(19) United States
(12) Patent Application Publication
(10) Pub. No.: US 2013/0067618 A1
(43) Pub. Date: Mar. 14, 2013

(54) METHODS AND COMPOSITIONS FOR WEED CONTROL

(71) Applicants: DANIEL ADER, St. Louis, MO (US); John J. Finnessy, Des Peres, MO (US); Zhaolong Li, St. Charles, MO (US); Christina Marie Taylor, Chesterfield, MO (US); Jennifer Chou Taylor, Ballwin, MO (US); Ronak Hasmukh Shah, Chesterfield, MO (US); Nengbing Tao, O'Fallon, MO (US); Dafu Wang, Chesterfield, MO (US); Lisa Marie Weaver, O'Fallon, MO (US)

(72) Inventors: DANIEL ADER, St. Louis, MO (US); John J. Finnessy, Des Peres, MO (US); Zhaolong Li, St. Charles, MO (US); Christina Marie Taylor, Chesterfield, MO (US); Jennifer Chou Taylor, Ballwin, MO (US); Ronak Hasmukh Shah, Chesterfield, MO (US); Nengbing Tao, O'Fallon, MO (US); Dafu Wang, Chesterfield, MO (US); Lisa Marie Weaver, O'Fallon, MO (US)

(21) Appl. No.: 13/612,929

(22) Filed: Sep. 13, 2012

Related U.S. Application Data
(60) Provisional application No. 61/534,061, filed on Sep. 13, 2011.

(51) Int. Cl. A01N 57/16; C12N 15/63; A01P 13/00; A01H 3/04; A01P 21/00; C12P 19/34; C07H 21/04

(52) U.S. Cl. 800/278; 435/91.1; 435/320.1; 504/128; 504/196; 536/24.5

(57) ABSTRACT

The present invention provides novel compositions for use to enhance weed control. Specifically, the present invention provides for methods and compositions that modulate acetolactate synthase in weed species. The present invention also provides for combinations of compositions and methods that enhance weed control.

[0001] This application claims benefit under 35USC §119(e) of U.S. provisional application Ser. No. 61/534,061 filed Sep. 13, 2011, herein incorporated by reference in it's entirety. The sequence listing that is contained in the file named “40_{—}21(58635)B seq listing.txt”, which is 1,997,877 bytes (measured in operating system MS-Windows) and was created on 9 Sep. 2012, is filed herewith and incorporated herein by reference.

### FIELD

[0002] The invention relates generally to the field of weed management. More specifically, the invention relates to acetolactate synthase genes in weedy plants and compositions containing polynucleotide molecules for modulating their expression. The invention further provides methods and compositions useful for weed control.

### BACKGROUND

[0003] Weeds are plants that compete with cultivated plants in an agronomic environment and cost farmers billions of dollars annually in crop losses and the expense of efforts to keep weeds under control. Weeds also serve as hosts for crop diseases and insect pests. The losses caused by weeds in agricultural production environments include decreases in crop yield, reduced crop quality, increased irrigation costs, increased harvesting costs, reduced land value, injury to livestock, and crop damage from insects and diseases harbored by the weeds. The principal means by which weeds cause these effects are: 1) competing with crop plants for water, nutrients, sunlight and other essentials for growth and development, 2) production of toxic or irritant chemicals that cause human or animal health problem, 3) production of immense quantities of seed or vegetative reproductive parts or both that contaminate agricultural products and perpetuate the species in agricultural lands, and 4) production on agricultural and nonagricultural lands of vast amounts of vegetation that must be disposed of. Herbicide tolerant weeds are a problem with nearly all herbicides in use, there is a need to effectively manage these weeds. There are over 365 weed biotypes currently identified as being herbicide resistant to one or more herbicides by the Herbicide Resistance Action Committee (HRAC), the North American Herbicide Resistance Action Committee (NAHRAC), and the Weed Science Society of America (WSSA).

[0004] The ALS (acetolactate synthase, also known as acetohydroxyacid synthase, AHAS) enzyme catalyzes the first step in the synthesis of the branched-chain amino acids (valine, leucine, and isoleucine). ALS includes a large subunit member and a small subunit member that function to provide regulated production of the branched-chain amino acids. This enzyme is the target of many ALS inhibiting herbicides that include members of the chemical families of Sulfonylureas, Imidazolinones, Triazolopyrimidines, Pyrimidinyl(thio)benzoates, and Sulfonylaminocarbonyl-triazolinones.

### SUMMARY

[0005] In one aspect, the invention comprises a method of weedy plant control comprising an external application to a weedy plant of a composition comprising a polynucleotide and a transfer agent, wherein the polynucleotide is essentially identical or essentially complementary to an ALS gene sequence, or to the RNA transcript of said ALS gene sequence, wherein said ALS gene sequence is selected from the group consisting of SEQ ID NO:1-45 and 1692-1788 or a polynucleotide fragment thereof, whereby the weedy plant growth or development or reproductive ability is reduced or the weedy plant is more sensitive to an ALS inhibitor herbicide relative to a weedy plant not treated with said composition. In this manner, plants that have become resistant to the application of glyphosate containing herbicides may be made more susceptible to the herbicidal effects of a glyphosate containing herbicide, thus potentiating the effect of the herbicide. The polynucleotide fragment is at least 18 contiguous nucleotides, at least 19 contiguous nucleotides, at least 20 contiguous nucleotides or at least 21 contiguous nucleotides in length and at least 85 percent identical to an ALS gene sequence selected from the group consisting of SEQ ID NO:1-45 and 1692-1788 and the transfer agent is an organosilicone composition or compound. The polynucleotide fragment can also be sense or anti-sense ssDNA or ssRNA, dsRNA, or dsDNA, or dsDNA/RNA hybrids. The composition can include more than one polynucleotide fragments, and the composition can include an ALS inhibitor herbicide and/or other herbicides that enhance the weed control activity of the composition.

[0006] In another aspect, polynucleotide molecules and methods for modulating ALS gene expression in weedy plant species are provided. The method reduces expression of an ALS gene in a weedy plant comprising an external application to a weedy plant of a composition comprising a polynucleotide and a transfer agent, wherein the polynucleotide is essentially identical or essentially complementary to an ALS gene sequence or fragment thereof, or to the RNA transcript of the ALS gene sequence or fragment thereof, wherein the ALS gene sequence is selected from the group consisting of SEQ ID NO:1-45 and 1692-1788 or a polynucleotide fragment thereof. The polynucleotide fragment fragment is at least 18 contiguous nucleotides, at least 19 contiguous nucleotides, at least 20 contiguous nucleotides at least 21 contiguous nucleotides in length and at least 85 percent identical to an ALS gene sequence selected from the group consisting of SEQ ID NO:1-45 and 1692-1788 and the transfer agent is an organosilicone compound. The polynucleotide fragment can also be sense or anti-sense ssDNA or ssRNA, dsRNA, or dsDNA, or dsDNA/RNA hybrids.

[0007] In a further aspect of the invention, the polynucleotide molecule containing composition of the invention may be combined with other herbicidal compounds to provide additional control of unwanted plants in a field of cultivated plants.

[0008] In a further aspect, the polynucleotide molecule composition may be combined with any one or more additional agricultural chemicals, such as, insecticides, fungicides, nematocides, bactericides, acaricides, growth regulators, chemosterilants, semiochemicals, repellents, attractants, pheromones, feeding stimulants, biopesticides, microbial pesticides or other biologically active compounds to form a multi-component pesticide giving an even broader spectrum of agricultural protection.

### BRIEF DESCRIPTION OF THE FIGURES

[0009] The following drawings form part of the present specification and are included to further demonstrate certain aspects of the present invention. The invention may be better understood by reference to one or more of these drawings in combination with the detailed description of specific embodiments presented herein. The invention can be more fully understood from the following description of the figures:

[0010] FIG. 1. Treatment of Amaranthus palmer plants with ssDNA trigger polynucleotides and ALS inhibitor herbicide (Staple®).

[0011] FIG. 2. Treatment of Amaranthus palmer plants with the ALS_pro_S1 trigger molecule demonstrating improved activity of the Staple® and Classic® herbicides.

### DETAILED DESCRIPTION

[0012] The invention provides a method and compositions containing a polynucleotide that provide for regulation of an ALS (acetolactate synthase) large subunit and ALS small subunit gene expression and enhanced control of weedy plant species and importantly ALS inhibitor resistant weed biotypes. Aspects of the method can be applied to manage various weedy plants in agronomic and other cultivated environments.

[0013] The following definitions and methods are provided to better define the present invention and to guide those of ordinary skill in the art in the practice of the present invention. Unless otherwise noted, terms are to be understood according to conventional usage by those of ordinary skill in the relevant art. Where a term is provided in the singular, the inventors also contemplate aspects of the invention described by the plural of that term.

[0014] By “non-transcribable” polynucleotides is meant that the polynucleotides do not comprise a complete polymerase II transcription unit.

[0015] As used herein “solution” refers to homogeneous mixtures and non-homogeneous mixtures such as suspensions, colloids, micelles, and emulsions.

[0016] Weedy plants are plants that compete with cultivated plants, those of particular importance include, but are not limited to important invasive and noxious weeds in crop production, such as, Amaranthus species—A. albus, A. blitoides, A. hybridus, A. palmeri, A. powellii, A. retroflexus, A. spinosus, A. tuberculatus, and A. viridis; Ambrosia species—A. trifida, A. artemisifolia; Lolium species—L. multiflorum, L. rigidium, L perenne; Digitaria species—D. insularis; Euphorbia species—E. heterophylla; Kochia species—K. scoparia; Sorghum species—S. halepense; Conyza species—C. bonariensis, C. canadensis, C. sumatrensis; Chloris species—C. truncate; Echinochola species—E. colona, E. crus-galli; Eleusine species—E. indica; Poa species—P. annua; Plantago species—P. lanceolata; Avena species—A. fatua; Chenopodium species—C. album; Setaria species—S. viridis, Abutilon theophrasti, Ipomoea species, Sesbania, species, Cassia species, Sida species, Brachiaria, species and Solanum species.

[0017] Additional weedy plant species found in cultivated areas include Alopecurus myosuroides, Avena sterilis, Avena sterilis ludoviciana, Brachiaria plantaginea, Bromus diandrus, Bromus rigidus, Cynosurus echinatus, Digitaria ciliaris, Digitaria ischaemum, Digitaria sanguinalis, Echinochloa oryzicola, Echinochloa phyllopogon, Eriochloa punctata, Hordeum glaucum, Hordeum leporinum, Ischaemum rugosum, Leptochloa chinensis, Lolium persicum, Phalaris minor, Phalaris paradoxa, Rottboellia exalta, Setaria faberi, Setaria viridis var, robusta-alba schreiber, Setaria viridis var, robusta-purpurea, Snowdenia polystachea, Sorghum sudanese, Alisma plantago-aquatica, Amaranthus lividus, Amaranthus quitensis, Ammania auriculata, Ammania coccinea, Anthemis cotula, Apera spica-venti, Bacopa rotundifolia, Bidens pilosa, Bidens subalternans, Brassica tournefortii, Bromus tectorum, Camelina microcarpa, Chrysanthemum coronarium, Cuscuta campestris, Cyperus difformis, Damasonium minus, Descurainia sophia, Diplotaxis tenuifolia, Echium plantagineum, Elatine triandra var, pedicellate, Euphorbia heterophylla, Fallopia convolvulus, Fimbristylis miliacea, Galeopsis tetrahit, Galium spurium, Helianthus annuus, Iva xanthifolia, Ixophorus unisetus, Ipomoea indica, Ipomoea purpurea, Ipomoea sepiaria, Ipomoea aquatic, Ipomoea triloba, Lactuca serriola, Limnocharis flava, Limnophila erecta, Limnophila sessiliflora, Lindernia dubia, Lindernia dubia var, major, Lindernia micrantha, Lindernia procumbens, Mesembryanthemum crystallinum, Monochoria korsakowii, Monochoria vaginalis, Neslia paniculata, Papaver rhoeas, Parthenium hysterophorus, Pentzia suffruticosa, Phalaris minor, Raphanus raphanistrum, Raphanus sativus, Rapistrum rugosum, Rotala indica var, uliginosa, Sagittaria guyanensis, Sagittaria montevidensis, Sagittaria pygmaea, Salsola iberica, Scirpus juncoides var, ohwianus, Scirpus mucronatus, Setaria lutescens, Sida spinosa, Sinapis arvensis, Sisymbrium orientate, Sisymbrium thellungii, Solanum ptycanthum, Sonchus asper, Sonchus oleraceus, Sorghum bicolor, Stellaria media, Thlaspi arvense, Xanthium strumarium, Arctotheca calendula, Conyza sumatrensis, Crassocephalum crepidiodes, Cuphea carthagenenis, Epilobium adenocaulon, Erigeron philadelphicus, Landoltia punctata, Lepidium virginicum, Monochoria korsakowii, Solanum americanum, Solanum nigrum, Vulpia bromoides, Youngia japonica, Hydrilla verticillata, Carduus nutans, Carduus pycnocephalus, Centaurea solstitialis, Cirsium arvense, Commelina diffusa, Convolvulus arvensis, Daucus carota, Digitaria ischaemum, Echinochloa crus-pavonis, Fimbristylis miliacea, Galeopsis tetrahit, Galium spurium, Limnophila erecta, Matricaria perforate, Papaver rhoeas, Ranunculus acris, Soliva sessilis, Sphenoclea zeylanica, Stellaria media, Nassella trichotoma, Stipa neesiana, Agrostis stolonifera, Polygonum aviculare, Alopecurus japonicus, Beckmannia syzigachne, Bromus tectorum, Chloris inflate, Echinochloa erecta, Portulaca oleracea, and Senecio vulgaris. It is believed that all plants contain a acetolactate synthase gene in their genome, the sequence of which can be isolated and polynucleotides made according to the methods of the present invention that are useful for regulation, suppressing or delaying the expression of the target ALS gene (either the large subunit or the small subunit or both) in the plants and the growth or development of the treated plants.

[0018] A cultivated plant may also be weedy plant when it occurs in unwanted environments. For example, corn plants growing in a soybean field. Transgenic crops with one or more herbicide tolerances will need specialized methods of management to control weeds and volunteer crop plants. The present invention enables the targeting of a transgene for herbicide tolerance to permit the treated plants to become sensitive to the herbicide. For example, transgene ALS DNA sequences in transgenic events that include DP-356043-5.

[0019] A “trigger” or “trigger polynucleotide” is a polynucleotide molecule that is homologous or complementary to a target gene polynucleotide. The trigger polynucleotide molecules modulate expression of the target gene when topically applied to a plant surface with a transfer agent, whereby a plant treated with said composition has its growth or development or reproductive ability regulated, suppressed or delayed or said plant is more sensitive to an ALS inhibitor herbicide as a result of said polynucleotide containing composition relative to a plant not treated with a composition containing the trigger molecule. Trigger polynucleotides disclosed herein are generally described in relation to the target gene sequence and maybe used in the sense (homologous) or antisense (complementary) orientation as single stranded molecules or comprise both strands as double stranded molecules or nucleotide variants and modified nucleotides thereof depending on the various regions of a gene being targeted.

[0020] It is contemplated that the composition of the present invention will contain multiple polynucleotides and herbicides that include but not limited to ALS gene trigger polynucleotides and an ALS inhibitor herbicide and anyone or more additional herbicide target gene trigger polynucleotides and the related herbicides and anyone or more additional essential gene trigger polynucleotides. Essential genes are genes in a plant that provide key enzymes or other proteins, for example, a biosynthetic enzyme, metabolizing enzyme, receptor, signal transduction protein, structural gene product, transcription factor, or transport protein; or regulating RNAs, such as, microRNAs, that are essential to the growth or survival of the organism or cell or involved in the normal growth and development of the plant (Meinke, et al., Trends Plant Sci. 2008 September; 13(9):483-91). The suppression of an essential gene enhances the effect of a herbicide that affects the function of a gene product different than the suppressed essential gene. The compositions of the present invention can include various trigger polynucleotides that modulate the expression of an essential gene other than ALS.

[0021] Herbicides for which transgenes for plant tolerance have been demonstrated and the method of the present invention can be applied, include but are not limited to: auxin-like herbicides, glyphosate, glufosinate, sulfonylureas, imidazolinones, bromoxynil, delapon, dicamba, cyclohezanedione, protoporphyrionogen oxidase inhibitors, 4-hydroxyphenyl-pyruvate-dioxygenase inhibitors herbicides. For example, transgenes and their polynucleotide molecules that encode proteins involved in herbicide tolerance are known in the art, and include, but are not limited to an 5-enolpyruvylshikimate-3-phosphate synthase (EPSPS), for example, as more fully described in U.S. Pat. Nos. 7,807,791 (SEQ ID NO:5); 6,248,876 B1; 5,627,061; 5,804,425; 5,633,435; 5,145,783; 4,971,908; 5,312,910; 5,188,642; 4,940,835; 5,866,775; 6,225,114 B1; 6,130,366; 5,310,667; 4,535,060; 4,769,061; 5,633,448; 5,510,471; U.S. Pat. No. Re. 36,449; U.S. Pat. Nos. RE 37,287 E; and 5,491,288; tolerance to sulfonylurea and/or imidazolinone, for example, as described more fully in U.S. Pat. Nos. 5,605,011; 5,013,659; 5,141,870; 5,767,361; 5,731,180; 5,304,732; 4,761,373; 5,331,107; 5,928,937; and 5,378,824; and international publication WO 96/33270; tolerance to hydroxyphenylpyruvatedioxygenases inhibiting herbicides in plants are described in U.S. Pat. Nos. 6,245,968 B1; 6,268,549; and 6,069,115; and U.S. Pat. No. 7,312,379 SEQ ID NO:3; U.S. Pat. No. 7,935,869; U.S. Pat. No. 7,304,209, SEQ ID NO:1, 3, 5 and 15; aryloxyalkanoate dioxygenase polynucleotides, which confer tolerance to 2,4-D and other phenoxy auxin herbicides as well as to aryloxyphenoxypropionate herbicides as described, for example, in WO2005/107437; U.S. Pat. No. 7,838,733 SEQ ID NO:5) and dicamba-tolerance polynucleotides as described, for example, in Herman et al. (2005) J. Biol. Chem. 280: 24759-24767. Other examples of herbicide-tolerance traits include those conferred by polynucleotides encoding an exogenous phosphinothricin acetyltransferase, as described in U.S. Pat. Nos. 5,969,213; 5,489,520; 5,550,318; 5,874,265; 5,919,675; 5,561,236; 5,648,477; 5,646,024; 6,177,616; and 5,879,903. Plants containing an exogenous phosphinothricin acetyltransferase can exhibit improved tolerance to glufosinate herbicides, which inhibit the enzyme glutamine synthase. Additionally, herbicide-tolerance polynucleotides include those conferred by polynucleotides conferring altered protoporphyrinogen oxidase (protox) activity, as described in U.S. Pat. Nos. 6,288,306 B1; 6,282,837 B1; and 5,767,373; and WO 01/12825. Plants containing such polynucleotides can exhibit improved tolerance to any of a variety of herbicides which target the protox enzyme (also referred to as protox inhibitors). Polynucleotides encoding a glyphosate oxidoreductase and a glyphosate-N-acetyl transferase (GOX described in U.S. Pat. No. 5,463,175 and GAT described in U.S. Patent publication 20030083480, dicamba monooxygenase U.S. Patent publication 20030135879, all of which are incorporated herein by reference); a polynucleotide molecule encoding bromoxynil nitrilase (Bxn described in U.S. Pat. No. 4,810,648 for Bromoxynil tolerance, which is incorporated herein by reference); a polynucleotide molecule encoding phytoene desaturase (crtI) described in Misawa et al, (1993) Plant J. 4:833-840 and Misawa et al, (1994) Plant J. 6:481-489 for norflurazon tolerance; a polynucleotide molecule encoding acetohydroxyacid synthase (AHAS, aka ALS) described in Sathasiivan et al. (1990) Nucl. Acids Res. 18:2188-2193 for tolerance to sulfonylurea herbicides; and the bar gene described in DeBlock, et al. (1987) EMBO J. 6:2513-2519 for glufosinate and bialaphos tolerance. The transgenic coding regions and regulatory elements of the herbicide tolerance genes are targets in which polynucleotide triggers and herbicides can be included in the composition of the present invention.

[0022] The composition of the present invention include a component that is an ALS inhibitor herbicide which includes but are not limited to amidosulfuron, azimsulfuron, bensulfuron-methyl, chlorimuron-ethyl, chlorsulfuron, cinosulfuron, cyclosulfamuron, ethametsulfuron-methyl, ethoxysulfuron, flazasulfuron, flupyrsulfuron-methyl-Na, foramsulfuron, halosulfuron-methyl, imazosulfuron, iodosulfuron, metsulfuron-methyl, nicosulfuron, oxasulfuron, primisulfuron-methyl, prosulfuron, pyrazosulfuron-ethyl, rimsulfuron, sulfometuron-methyl, sulfosulfuron, thifensulfuron-methyl, triasulfuron, tribenuron-methyl, trifloxysulfuron, triflusulfuron-methyl, tritosulfuron, imazapic, imazamethabenz-methyl, imazamox, imazapyr, imazaquin, imazethapyr, cloransulam-methyl, diclosulam, florasulam, flumetsulam, metosulam, bispyribac-Na, pyribenzoxim, pyriftalid, pyrithiobac-Na, pyriminobac-methyl, flucarbazone-Na, and procarbazone-Na.

[0023] Numerous herbicides (herein referred to as co-herbicides) are available that can be added to the composition, for example, members of the herbicide families that include but are not limited to amide herbicides, aromatic acid herbicides, arsenical herbicides, benzothiazole herbicides, benzoylcyclohexanedione herbicides, benzofuranyl alkylsulfonate herbicides, carbamate herbicides, cyclohexene oxime herbicides, cyclopropylisoxazole herbicides, dicarboximide herbicides, dinitroaniline herbicides, dinitrophenol herbicides, diphenyl ether herbicides, dithiocarbamate herbicides, halogenated aliphatic herbicides, imidazolinone herbicides, inorganic herbicides, nitrile herbicides, organophosphorus herbicides, oxadiazolone herbicides, oxazole herbicides, phenoxy herbicides, phenylenediamine herbicides, pyrazole herbicides, pyridazine herbicides, pyridazinone herbicides, pyridine herbicides, pyrimidinediamine herbicides, pyrimidinyloxybenzylamine herbicides, quaternary ammonium herbicides, thiocarbamate herbicides, thiocarbonate herbicides, thiourea herbicides, triazine herbicides, triazinone herbicides, triazole herbicides, triazolone herbicides, triazolopyrimidine herbicides, uracil herbicides, and urea herbicides. In particular, the rates of use of the added herbicides can be reduced in compositions comprising the polynucleotides. Use rate reductions of the additional added herbicides can be 10-25 percent, 26-50 percent, 51-75 percent or more can be achieved that enhance the activity of the polynucleotides and herbicide composition and is contemplated. Representative herbicides of the families include but are not limited to acetochlor, acifluorfen, acifluorfen-sodium, aclonifen, acrolein, alachlor, alloxydim, allyl alcohol, ametryn, amicarbazone, amidosulfuron, aminopyralid, amitrole, ammonium sulfamate, anilofos, asulam, atraton, atrazine, azimsulfuron, BCPC, beflubutamid, benazolin, benfluralin, benfuresate, bensulfuron, bensulfuron-methyl, bensulide, bentazone, benzfendizone, benzobicyclon, benzofenap, bifenox, bilanafos, bispyribac, bispyribac-sodium, borax, bromacil, bromobutide, bromoxynil, butachlor, butafenacil, butamifos, butralin, butroxydim, butylate, cacodylic acid, calcium chlorate, cafenstrole, carbetamide, carfentrazone, carfentrazone-ethyl, CDEA, CEPC, chlorflurenol, chlorflurenol-methyl, chloridazon, chlorimuron, chlorimuron-ethyl, chloroacetic acid, chlorotoluron, chlorpropham, chlorsulfuron, chlorthal, chlorthal-dimethyl, cinidon-ethyl, cinmethylin, cinosulfuron, cisanilide, clethodim, clodinafop, clodinafop-propargyl, clomazone, clomeprop, clopyralid, cloransulam, cloransulam-methyl, CMA, 4-CPB, CPMF, 4-CPP, CPPC, cresol, cumyluron, cyanamide, cyanazine, cycloate, cyclosulfamuron, cycloxydim, cyhalofop, cyhalofop-butyl, 2,4-D, 3,4-DA, daimuron, dalapon, dazomet, 2,4-DB, 3,4-DB, 2,4-DEB, desmedipham, dicamba, dichlobenil, ortho-dichlorobenzene, para-dichlorobenzene, dichlorprop, dichlorprop-P, diclofop, diclofop-methyl, diclosulam, difenzoquat, difenzoquat metilsulfate, diflufenican, diflufenzopyr, dimefuron, dimepiperate, dimethachlor, dimethametryn, dimethenamid, dimethenamid-P, dimethipin, dimethylarsinic acid, dinitramine, dinoterb, diphenamid, diquat, diquat dibromide, dithiopyr, diuron, DNOC, 3,4-DP, DSMA, EBEP, endothal, EPTC, esprocarb, ethalfluralin, ethametsulfuron, ethametsulfuron-methyl, ethofumesate, ethoxyfen, ethoxysulfuron, etobenzanid, fenoxaprop-P, fenoxaprop-P-ethyl, fentrazamide, ferrous sulfate, flamprop-M, flazasulfuron, florasulam, fluazifop, fluazifop-butyl, fluazifop-P, fluazifop-P-butyl, flucarbazone, flucarbazone-sodium, flucetosulfuron, fluchloralin, flufenacet, flufenpyr, flufenpyr-ethyl, flumetsulam, flumiclorac, flumiclorac-pentyl, flumioxazin, fluometuron, fluoroglycofen, fluoroglycofen-ethyl, flupropanate, flupyrsulfuron, flupyrsulfuron-methyl-sodium, flurenol, fluridone, fluorochloridone, fluoroxypyr, flurtamone, fluthiacet, fluthiacet-methyl, fomesafen, foramsulfuron, fosamine, glufosinate, glufosinate-ammonium, glyphosate, halosulfuron, halosulfuron-methyl, haloxyfop, haloxyfop-P, HC-252, hexazinone, imazamethabenz, imazamethabenz-methyl, imazamox, imazapic, imazapyr, imazaquin, imazethapyr, imazosulfuron, indanofan, iodomethane, iodosulfuron, iodosulfuron-methyl-sodium, ioxynil, isoproturon, isouron, isoxaben, isoxachlortole, isoxaflutole, karbutilate, lactofen, lenacil, linuron, MAA, MAMA, MCPA, MCPA-thioethyl, MCPB, mecoprop, mecoprop-P, mefenacet, mefluidide, mesosulfuron, mesosulfuron-methyl, mesotrione, metam, metamifop, metamitron, metazachlor, methabenzthiazuron, methylarsonic acid, methyldymron, methyl isothiocyanate, metobenzuron, metolachlor, S-metolachlor, metosulam, metoxuron, metribuzin, metsulfuron, metsulfuron-methyl, MK-66, molinate, monolinuron, MSMA, naproanilide, napropamide, naptalam, neburon, nicosulfuron, nonanoic acid, norflurazon, oleic acid (fatty acids), orbencarb, orthosulfamuron, oryzalin, oxadiargyl, oxadiazon, oxasulfuron, oxaziclomefone, oxyfluorfen, paraquat, paraquat dichloride, pebulate, pendimethalin, penoxsulam, pentachlorophenol, pentanochlor, pentoxazone, pethoxamid, petrolium oils, phenmedipham, phenmedipham-ethyl, picloram, picolinafen, pinoxaden, piperophos, potassium arsenite, potassium azide, pretilachlor, primisulfuron, primisulfuron-methyl, prodiamine, profluazol, profoxydim, prometon, prometryn, propachlor, propanil, propaquizafop, propazine, propham, propisochlor, propoxycarbazone, propoxycarbazone-sodium, propyzamide, prosulfocarb, prosulfuron, pyraclonil, pyraflufen, pyraflufen-ethyl, pyrazolynate, pyrazosulfuron, pyrazosulfuron-ethyl, pyrazoxyfen, pyribenzoxim, pyributicarb, pyridafol, pyridate, pyriftalid, pyriminobac, pyriminobac-methyl, pyrimisulfan, pyrithiobac, pyrithiobac-sodium, quinclorac, quinmerac, quinoclamine, quizalofop, quizalofop-P, rimsulfuron, sethoxydim, siduron, simazine, simetryn, SMA, sodium arsenite, sodium azide, sodium chlorate, sulcotrione, sulfentrazone, sulfometuron, sulfometuron-methyl, sulfosate, sulfosulfuron, sulfuric acid, tar oils, 2,3,6-TBA, TCA, TCA-sodium, tebuthiuron, tepraloxydim, terbacil, terbumeton, terbuthylazine, terbutryn, thenylchlor, thiazopyr, thifensulfuron, thifensulfuron-methyl, thiobencarb, tiocarbazil, topramezone, tralkoxydim, tri-allate, triasulfuron, triaziflam, tribenuron, tribenuron-methyl, tricamba, triclopyr, trietazine, trifloxysulfuron, trifloxysulfuron-sodium, trifluralin, triflusulfuron, triflusulfuron-methyl, trihydroxytriazine, tritosulfuron, [3-[2-chloro-4-fluoro-5-(-methyl-6-trifluoromethyl-2,4-dioxo-,2,3,44-etrahydropyrimidin-3-yl)phenoxy]-2-pyridyloxy]acetic acid ethyl ester (CAS RN 353292-3-6), 4-[(4,5-dihydro-3-methoxy-4-methyl-5-oxo)-H-,2,4-triazol-1-ylcarbonyl-sulfamoyl]-5-methylthiophene-3-carboxylic acid (BAY636), BAY747 (CAS RN 33504-84-2), topramezone (CAS RN 2063-68-8), 4-hydroxy-3-[[2-[(2-methoxyethoxy)methyl]-6-(trifluoro-methyl)-3-pyridi-nyl]carbonyl]-bicyclo[3.2.]oct-3-en-2-one (CAS RN 35200-68-5), and 4-hydroxy-3-[[2-(3-methoxypropyl)-6-(difluoromethyl)-3-pyridinyl]carbon-yl]-bicyclo[3.2.]oct-3-en-2-one. Additionally, including herbicidal compounds of unspecified modes of action as described in CN101279950A, CN101279951A, DE10000600A1, DE10116399A1, DE102004054666A1, DE102005014638A1, DE102005014906A1, DE102007012168A1, DE102010042866A1, DE10204951A1, DE10234875A1, DE10234876A1, DE10256353A1, DE10256354A1, DE10256367A1, EP1157991A2, EP1238586A1, EP2147919A1, EP2160098A2, JP03968012B2, JP2001253874A, JP2002080454A, JP2002138075A, JP2002145707A, JP2002220389A, JP2003064059A, JP2003096059A, JP2004051628A, JP2004107228A, JP2005008583A, JP2005239675A, JP2005314407A, JP2006232824A, JP2006282552A, JP2007153847A, JP2007161701A, JP2007182404A, JP2008074840A, JP2008074841A, JP2008133207A, JP2008133218A, JP2008169121A, JP2009067739A, JP2009114128A, JP2009126792A, JP2009137851A, US20060111241A1, US20090036311A1, US20090054240A1, US20090215628A1, US20100099561A1, US20100152443A1, US20110105329A1, US20110201501A1, WO2001055066A2, WO2001056975A1, WO2001056979A1, WO2001090071A2, WO2001090080A1, WO2002002540A1, WO2002028182A1, WO2002040473A1, WO2002044173A2, WO2003000679A2, WO2003006422A1, WO2003013247A1, WO2003016308A1, WO2003020704A1, WO2003022051A1, WO2003022831A1, WO2003022843A1, WO2003029243A2, WO2003037085A1, WO2003037878A1, WO2003045878A2, WO2003050087A2, WO2003051823A1, WO2003051824A1, WO2003051846A2, WO2003076409A1, WO2003087067A1, WO2003090539A1, WO2003091217A1, WO2003093269A2, WO2003104206A2, WO2004002947A1, WO2004002981A2, WO2004011429A1, WO2004029060A1, WO2004035545A2, WO2004035563A1, WO2004035564A1, WO2004037787A1, WO2004067518A1, WO2004067527A1, WO2004077950A1, WO2005000824A1, WO2005007627A1, WO2005040152A1, WO2005047233A1, WO2005047281A1, WO2005061443A2, WO2005061464A1, WO2005068434A1, WO2005070889A1, WO2005089551A1, WO2005095335A1, WO2006006569A1, WO2006024820A1, WO2006029828A1, WO2006029829A1, WO2006037945A1, WO2006050803A1, WO2006090792A1, WO2006123088A2, WO2006125687A1, WO2006125688A1, WO2007003294A1, WO2007026834A1, WO2007071900A1, WO2007077201A1, WO2007077247A1, WO2007096576A1, WO2007119434A1, WO2007134984A1, WO2008009908A1, WO2008029084A1, WO2008059948A1, WO2008071918A1, WO2008074991A1, WO2008084073A1, WO2008100426A2, WO2008102908A1, WO2008152072A2, WO2008152073A2, WO2009000757A1, WO2009005297A2, WO2009035150A2, WO2009063180A1, WO2009068170A2, WO2009068171A2, WO2009086041A1, WO2009090401A2, WO2009090402A2, WO2009115788A1, WO2009116558A1, WO2009152995A1, WO2009158258A1, WO2010012649A1, WO2010012649A1, WO2010026989A1, WO2010034153A1, WO2010049270A1, WO2010049369A1, WO2010049405A1, WO2010049414A1, WO2010063422A1, WO2010069802A1, WO2010078906A2, WO2010078912A1, WO2010104217A1, WO2010108611A1, WO2010112826A3, WO2010116122A3, WO2010119906A1, WO2010130970A1, WO2011003776A2, WO2011035874A1, WO2011065451A1, all of which are incorporated herein by reference.

[0024] The trigger polynucleotide and oligonucleotide molecule compositions are useful in compositions, such as liquids that comprise the polynucleotide molecules at low concentrations, alone or in combination with other components, for example one or more herbicide molecules, either in the same solution or in separately applied liquids that also provide a transfer agent. While there is no upper limit on the concentrations and dosages of polynucleotide molecules that can useful in the methods, lower effective concentrations and dosages will generally be sought for efficiency. The concentrations can be adjusted in consideration of the volume of spray or treatment applied to plant leaves or other plant part surfaces, such as flower petals, stems, tubers, fruit, anthers, pollen, or seed. In one embodiment, a useful treatment for herbaceous plants using 25-mer oligonucleotide molecules is about 1 nanomole (nmol) of oligonucleotide molecules per plant, for example, from about 0.05 to 1 nmol per plant. Other embodiments for herbaceous plants include useful ranges of about 0.05 to about 100 nmol, or about 0.1 to about 20 nmol, or about 1 nmol to about 10 nmol of polynucleotides per plant. Very large plants, trees, or vines may require correspondingly larger amounts of polynucleotides. When using long dsRNA molecules that can be processed into multiple oligonucleotides, lower concentrations can be used. To illustrate embodiments, the factor 1×, when applied to oligonucleotide molecules is arbitrarily used to denote a treatment of 0.8 nmol of polynucleotide molecule per plant; 10×, 8 nmol of polynucleotide molecule per plant; and 100×, 80 nmol of polynucleotide molecule per plant.

[0025] The polynucleotide compositions are useful in compositions, such as liquids that comprise polynucleotide molecules, alone or in combination with other components either in the same liquid or in separately applied liquids that provide a transfer agent. As used herein, a transfer agent is an agent that, when combined with a polynucleotide in a composition that is topically applied to a target plant surface, enables the polynucleotide to enter a plant cell. In certain embodiments, a transfer agent is an agent that conditions the surface of plant tissue, e.g., leaves, stems, roots, flowers, or fruits, to permeation by the polynucleotide molecules into plant cells. The transfer of polynucleotides into plant cells can be facilitated by the prior or contemporaneous application of a polynucleotide-transferring agent to the plant tissue. In some embodiments the transferring agent is applied subsequent to the application of the polynucleotide composition. The polynucleotide transfer agent enables a pathway for polynucleotides through cuticle wax barriers, stomata and/or cell wall or membrane barriers into plant cells. Suitable transfer agents to facilitate transfer of the polynucleotide into a plant cell include agents that increase permeability of the exterior of the plant or that increase permeability of plant cells to oligonucleotides or polynucleotides. Such agents to facilitate transfer of the composition into a plant cell include a chemical agent, or a physical agent, or combinations thereof. Chemical agents for conditioning or transfer include (a) surfactants, (b) an organic solvent or an aqueous solution or aqueous mixtures of organic solvents, (c) oxidizing agents, (d) acids, (e) bases, (f) oils, (g) enzymes, or combinations thereof. Embodiments of the method can optionally include an incubation step, a neutralization step (e.g., to neutralize an acid, base, or oxidizing agent, or to inactivate an enzyme), a rinsing step, or combinations thereof. Embodiments of agents or treatments for conditioning of a plant to permeation by polynucleotides include emulsions, reverse emulsions, liposomes, and other micellar-like compositions. Embodiments of agents or treatments for conditioning of a plant to permeation by polynucleotides include counter-ions or other molecules that are known to associate with nucleic acid molecules, e.g., inorganic ammonium ions, alkyl ammonium ions, lithium ions, polyamines such as spermine, spermidine, or putrescine, and other cations. Organic solvents useful in conditioning a plant to permeation by polynucleotides include DMSO, DMF, pyridine, N-pyrrolidine, hexamethylphosphoramide, acetonitrile, dioxane, polypropylene glycol, other solvents miscible with water or that will dissolve phosphonucleotides in non-aqueous systems (such as is used in synthetic reactions). Naturally derived or synthetic oils with or without surfactants or emulsifiers can be used, e.g., plant-sourced oils, crop oils (such as those listed in the 9^{th} Compendium of Herbicide Adjuvants, publicly available on the worldwide web (internet) at herbicide.adjuvants.com can be used, e.g., paraffinic oils, polyol fatty acid esters, or oils with short-chain molecules modified with amides or polyamines such as polyethyleneimine or N-pyrrolidine. Transfer agents include, but are not limited to, organosilicone preparations.

[0026] An agronomic field in need of plant control is treated by application of the composition of the present invention directly to the surface of the growing plants, such as by a spray. For example, the method is applied to control weeds in a field of crop plants by spraying the field with the composition. The composition can be provided as a tank mix, a sequential treatment of components (generally the polynucleotide containing composition followed by the herbicide), or a simultaneous treatment or mixing of one or more of the components of the composition from separate containers. Treatment of the field can occur as often as needed to provide weed control and the components of the composition can be adjusted to target specific weed species or weed families through utilization of specific polynucleotides or polynucleotide compositions capable of selectively targeting the specific species or plant family to be controlled. The composition can be applied at effective use rates according to the time of application to the field, for example, preplant, at planting, post planting, post harvest. ALS inhibitor herbicides can be applied to a field at rates of 3 to 150 g ai/ha or more. The polynucleotides of the composition can be applied at rates of 1 to 30 grams per acre depending on the number of trigger molecules needed for the scope of weeds in the field.

[0027] Crop plants in which weed control is needed include but are not limited to, corn, soybean, cotton, canola, sugar beet, alfalfa, sugarcane, rice, and wheat; ii) vegetable plants including, but not limited to, tomato, sweet pepper, hot pepper, melon, watermelon, cucumber, eggplant, cauliflower, broccoli, lettuce, spinach, onion, peas, carrots, sweet corn, Chinese cabbage, leek, fennel, pumpkin, squash or gourd, radish, Brussels sprouts, tomatillo, garden beans, dry beans, or okra; iii) culinary plants including, but not limited to, basil, parsley, coffee, or tea; or, iv) fruit plants including but not limited to apple, pear, cherry, peach, plum, apricot, banana, plantain, table grape, wine grape, citrus, avocado, mango, or berry; v) a tree grown for ornamental or commercial use, including, but not limited to, a fruit or nut tree; or, vi) an ornamental plant (e.g., an ornamental flowering plant or shrub or turf grass). The methods and compositions provided herein can also be applied to plants produced by a cutting, cloning, or grafting process (i.e., a plant not grown from a seed) include fruit trees and plants that include, but are not limited to, citrus, apples, avocados, tomatoes, eggplant, cucumber, melons, watermelons, and grapes as well as various ornamental plants.

### Pesticidal Mixtures

[0028] The polynucleotide compositions may also be used as mixtures with various agricultural chemicals and/or insecticides, miticides and fungicides, pesticidal and biopesticidal agents. Examples include but are not limited to azinphos-methyl, acephate, isoxathion, isofenphos, ethion, etrimfos, oxydemeton-methyl, oxydeprofos, quinalphos, chlorpyrifos, chlorpyrifos-methyl, chlorfenvinphos, cyanophos, dioxabenzofos, dichlorvos, disulfoton, dimethylvinphos, dimethoate, sulprofos, diazinon, thiometon, tetrachlorvinphos, temephos, tebupirimfos, terbufos, naled, vamidothion, pyraclofos, pyridafenthion, pirimiphos-methyl, fenitrothion, fenthion, phenthoate, flupyrazophos, prothiofos, propaphos, profenofos, phoxime, phosalone, phosmet, formothion, phorate, malathion, mecarbam, mesulfenfos, methamidophos, methidathion, parathion, methyl parathion, monocrotophos, trichlorphon, EPN, isazophos, isamidofos, cadusafos, diamidaphos, dichlofenthion, thionazin, fenamiphos, fosthiazate, fosthietan, phosphocarb, DSP, ethoprophos, alanycarb, aldicarb, isoprocarb, ethiofencarb, carbaryl, carbosulfan, xylylcarb, thiodicarb, pirimicarb, fenobucarb, furathiocarb, propoxur, bendiocarb, benfuracarb, methomyl, metolcarb, XMC, carbofuran, aldoxycarb, oxamyl, acrinathrin, allethrin, esfenvalerate, empenthrin, cycloprothrin, cyhalothrin, gamma-cyhalothrin, lambda-cyhalothrin, cyfluthrin, beta-cyfluthrin, cypermethrin, alpha-cypermethrin, zeta-cypermethrin, silafluofen, tetramethrin, tefluthrin, deltamethrin, tralomethrin, bifenthrin, phenothrin, fenvalerate, fenpropathrin, furamethrin, prallethrin, flucythrinate, fluvalinate, flubrocythrinate, permethrin, resmethrin, ethofenprox, cartap, thiocyclam, bensultap, acetamiprid, imidacloprid, clothianidin, dinotefuran, thiacloprid, thiamethoxam, nitenpyram, chlorfluazuron, diflubenzuron, teflubenzuron, triflumuron, novaluron, noviflumuron, bistrifluoron, fluazuron, flucycloxuron, flufenoxuron, hexaflumuron, lufenuron, chromafenozide, tebufenozide, halofenozide, methoxyfenozide, diofenolan, cyromazine, pyriproxyfen, buprofezin, methoprene, hydroprene, kinoprene, triazamate, endosulfan, chlorfenson, chlorobenzilate, dicofol, bromopropylate, acetoprole, fipronil, ethiprole, pyrethrin, rotenone, nicotine sulphate, BT (Bacillus Thuringiensis) agent, spinosad, abamectin, acequinocyl, amidoflumet, amitraz, etoxazole, chinomethionat, clofentezine, fenbutatin oxide, dienochlor, cyhexatin, spirodiclofen, spiromesifen, tetradifon, tebufenpyrad, binapacryl, bifenazate, pyridaben, pyrimidifen, fenazaquin, fenothiocarb, fenpyroximate, fluacrypyrim, fluazinam, flufenzin, hexythiazox, propargite, benzomate, polynactin complex, milbemectin, lufenuron, mecarbam, methiocarb, mevinphos, halfenprox, azadirachtin, diafenthiuron, indoxacarb, emamectin benzoate, potassium oleate, sodium oleate, chlorfenapyr, tolfenpyrad, pymetrozine, fenoxycarb, hydramethylnon, hydroxy propyl starch, pyridalyl, flufenerim, flubendiamide, flonicamid, metaflumizole, lepimectin, TPIC, albendazole, oxibendazole, oxfendazole, trichlamide, fensulfothion, fenbendazole, levamisole hydrochloride, morantel tartrate, dazomet, metam-sodium, triadimefon, hexaconazole, propiconazole, ipconazole, prochloraz, triflumizole, tebuconazole, epoxiconazole, difenoconazole, flusilazole, triadimenol, cyproconazole, metconazole, fluquinconazole, bitertanol, tetraconazole, triticonazole, flutriafol, penconazole, diniconazole, fenbuconazole, bromuconazole, imibenconazole, simeconazole, myclobutanil, hymexazole, imazalil, furametpyr, thifluzamide, etridiazole, oxpoconazole, oxpoconazole fumarate, pefurazoate, prothioconazole, pyrifenox, fenarimol, nuarimol, bupirimate, mepanipyrim, cyprodinil, pyrimethanil, metalaxyl, mefenoxam, oxadixyl, benalaxyl, thiophanate, thiophanate-methyl, benomyl, carbendazim, fuberidazole, thiabendazole, manzeb, propineb, zineb, metiram, maneb, ziram, thiuram, chlorothalonil, ethaboxam, oxycarboxin, carboxin, flutolanil, silthiofam, mepronil, dimethomorph, fenpropidin, fenpropimorph, spiroxamine, tridemorph, dodemorph, flumorph, azoxystrobin, kresoxim-methyl, metominostrobin, orysastrobin, fluoxastrobin, trifloxystrobin, dimoxystrobin, pyraclostrobin, picoxystrobin, iprodione, procymidone, vinclozolin, chlozolinate, flusulfamide, dazomet, methyl isothiocyanate, chloropicrin, methasulfocarb, hydroxyisoxazole, potassium hydroxyisoxazole, echlomezol, D-D, carbam, basic copper chloride, basic copper sulfate, copper nonylphenolsulfonate, oxine copper, DBEDC, anhydrous copper sulfate, copper sulfate pentahydrate, cupric hydroxide, inorganic sulfur, wettable sulfur, lime sulfur, zinc sulfate, fentin, sodium hydrogen carbonate, potassium hydrogen carbonate, sodium hypochlorite, silver, edifenphos, tolclofos-methyl, fosetyl, iprobenfos, dinocap, pyrazophos, carpropamid, fthalide, tricyclazole, pyroquilon, diclocymet, fenoxanil, kasugamycin, validamycin, polyoxins, blasticiden S, oxytetracycline, mildiomycin, streptomycin, rape seed oil, machine oil, benthiavalicarbisopropyl, iprovalicarb, propamocarb, diethofencarb, fluoroimide, fludioxanil, fenpiclonil, quinoxyfen, oxolinic acid, chlorothalonil, captan, folpet, probenazole, acibenzolar-S-methyl, tiadinil, cyflufenamid, fenhexamid, diflumetorim, metrafenone, picobenzamide, proquinazid, famoxadone, cyazofamid, fenamidone, zoxamide, boscalid, cymoxanil, dithianon, fluazinam, dichlofluanide, triforine, isoprothiolane, ferimzone, diclomezine, tecloftalam, pencycuron, chinomethionat, iminoctadine acetate, iminoctadine albesilate, ambam, polycarbamate, thiadiazine, chloroneb, nickel dimethyldithiocarbamate, guazatine, dodecylguanidine-acetate, quintozene, tolylfluanid, anilazine, nitrothalisopropyl, fenitropan, dimethirimol, benthiazole, harpin protein, flumetover, mandipropamide and penthiopyrad.

### Polynucleotides

[0029] As used herein, the term “DNA”, “DNA molecule”, “DNA polynucleotide molecule” refers to a single-stranded DNA (ssDNA) or double-stranded DNA (dsDNA) molecule of genomic or synthetic origin, such as, a polymer of deoxyribonucleotide bases or a DNA polynucleotide molecule. As used herein, the term “DNA sequence”, “DNA nucleotide sequence” or “DNA polynucleotide sequence” refers to the nucleotide sequence of a DNA molecule. As used herein, the term “RNA”, “RNA molecule”, “RNA polynucleotide molecule” refers to a single-stranded RNA (ssRNA) or double-stranded RNA (dsRNA) molecule of genomic or synthetic origin, such as, a polymer of ribonucleotide bases that comprise single or double stranded regions. Unless otherwise stated, nucleotide sequences in the text of this specification are given, when read from left to right, in the 5′ to 3′ direction. The nomenclature used herein is that required by Title 37 of the United States Code of Federal Regulations §1.822 and set forth in the tables in WIPO Standard ST.25 (1998), Appendix 2, Tables 1 and 3.

[0030] As used herein, “polynucleotide” refers to a DNA or RNA molecule containing multiple nucleotides and generally refers both to “oligonucleotides” (a polynucleotide molecule of typically 50 or fewer nucleotides in length) and polynucleotides of 51 or more nucleotides. Embodiments of this invention include compositions including oligonucleotides having a length of 18-25 nucleotides (18-mers, 19-mers, 20-mers, 21-mers, 22-mers, 23-mers, 24-mers, or 25-mers), for example, oligonucleotides SEQ ID NO: 1364-1691 and 4167-4201 or fragments thereof, or medium-length polynucleotides having a length of 26 or more nucleotides (polynucleotides of 26, 27, 28, 29, 30, 31, 32, 33, 34, 35, 36, 37, 38, 39, 40, 41, 42, 43, 44, 45, 46, 47, 48, 49, 50, 51, 52, 53, 54, 55, 56, 57, 58, 59, 60, about 65, about 70, about 75, about 80, about 85, about 90, about 95, about 100, about 110, about 120, about 130, about 140, about 150, about 160, about 170, about 180, about 190, about 200, about 210, about 220, about 230, about 240, about 250, about 260, about 270, about 280, about 290, or about 300 nucleotides), for example, oligonucleotides SEQ ID NO: 46-1363 and 1789-4166 or fragments thereof or long polynucleotides having a length greater than about 300 nucleotides (for example, polynucleotides of between about 300 to about 400 nucleotides, between about 400 to about 500 nucleotides, between about 500 to about 600 nucleotides, between about 600 to about 700 nucleotides, between about 700 to about 800 nucleotides, between about 800 to about 900 nucleotides, between about 900 to about 1000 nucleotides, between about 300 to about 500 nucleotides, between about 300 to about 600 nucleotides, between about 300 to about 700 nucleotides, between about 300 to about 800 nucleotides, between about 300 to about 900 nucleotides, or about 1000 nucleotides in length, or even greater than about 1000 nucleotides in length, for example up to the entire length of a target gene including coding or non-coding or both coding and non-coding portions of the target gene) for example, polynucleotides of Table 1 (SEQ ID NO:1-45 and 1692-1788), wherein the selected polynucleotides or fragments thereof are homologous or complementary to SEQ ID NO:1-45 and 1692-1788 and suppresses, represses or otherwise delay the expression of the target ALS gene. A target gene comprises any polynucleotide molecule in a plant cell or fragment thereof for which the modulation of the expression of the target gene is provided by the methods and compositions of the present invention. Where a polynucleotide is double-stranded, its length can be similarly described in terms of base pairs. Oligonucleotides and polynucleotides of the present invention can be made that are essentially identical or essentially complementary to adjacent genetic elements of a gene, for example, spanning the junction region of an intron and exon, the junction region of a promoter and a transcribed region, the junction region of a 5′ leader and a coding sequence, the junction of a 3′ untranslated region and a coding sequence.

[0031] Polynucleotide compositions used in the various embodiments of this invention include compositions including oligonucleotides or polynucleotides or a mixture of both, including RNA or DNA or RNA/DNA hybrids or chemically modified oligonucleotides or polynucleotides or a mixture thereof. In some embodiments, the polynucleotide may be a combination of ribonucleotides and deoxyribonucleotides, for example, synthetic polynucleotides consisting mainly of ribonucleotides but with one or more terminal deoxyribonucleotides or synthetic polynucleotides consisting mainly of deoxyribonucleotides but with one or more terminal dideoxyribonucleotides. In some embodiments, the polynucleotide includes non-canonical nucleotides such as inosine, thiouridine, or pseudouridine. In some embodiments, the polynucleotide includes chemically modified nucleotides. Examples of chemically modified oligonucleotides or polynucleotides are well known in the art; see, for example, US Patent Publication 20110171287, US Patent Publication 20110171176, and US Patent Publication 20110152353, US Patent Publication, 20110152346, US Patent Publication 20110160082, herein incorporated by reference. For example, including but not limited to the naturally occurring phosphodiester backbone of an oligonucleotide or polynucleotide can be partially or completely modified with phosphorothioate, phosphorodithioate, or methylphosphonate internucleotide linkage modifications, modified nucleoside bases or modified sugars can be used in oligonucleotide or polynucleotide synthesis, and oligonucleotides or polynucleotides can be labeled with a fluorescent moiety (for example, fluorescein or rhodamine) or other label (for example, biotin).

[0032] The polynucleotides can be single- or double-stranded RNA or single- or double-stranded DNA or double-stranded DNA/RNA hybrids or modified analogues thereof, and can be of oligonucleotide lengths or longer. In more specific embodiments of the invention the polynucleotides that provide single-stranded RNA in the plant cell are selected from the group consisting of (a) a single-stranded RNA molecule (ssRNA), (b) a single-stranded RNA molecule that self-hybridizes to form a double-stranded RNA molecule, (c) a double-stranded RNA molecule (dsRNA), (d) a single-stranded DNA molecule (ssDNA), (e) a single-stranded DNA molecule that self-hybridizes to form a double-stranded DNA molecule, and (f) a single-stranded DNA molecule including a modified Pol III gene that is transcribed to an RNA molecule, (g) a double-stranded DNA molecule (dsDNA), (h) a double-stranded DNA molecule including a modified Pol III gene that is transcribed to an RNA molecule, (i) a double-stranded, hybridized RNA/DNA molecule, or combinations thereof. In some embodiments these polynucleotides include chemically modified nucleotides or non-canonical nucleotides. In embodiments of the method the polynucleotides include double-stranded DNA formed by intramolecular hybridization, double-stranded DNA formed by intermolecular hybridization, double-stranded RNA formed by intramolecular hybridization, or double-stranded RNA formed by intermolecular hybridization. In one embodiment the polynucleotides include single-stranded DNA or single-stranded RNA that self-hybridizes to form a hairpin structure having an at least partially double-stranded structure including at least one segment that will hybridize to RNA transcribed from the gene targeted for suppression. Not intending to be bound by any mechanism, it is believed that such polynucleotides are or will produce single-stranded RNA with at least one segment that will hybridize to RNA transcribed from the gene targeted for suppression. In certain other embodiments the polynucleotides further includes a promoter, generally a promoter functional in a plant, for example, a pol II promoter, a pol III promoter, a pol IV promoter, or a pol V promoter.

[0033] The term “gene” refers to components that comprise chromosomal DNA, plasmid DNA, cDNA, intron and exon DNA, artificial DNA polynucleotide, or other DNA that encodes a peptide, polypeptide, protein, or RNA transcript molecule, and the genetic elements flanking the coding sequence that are involved in the regulation of expression, such as, promoter regions, 5′ leader regions, 3′ untranslated region that may exist as native genes or transgenes in a plant genome. The gene or a fragment thereof is isolated and subjected to polynucleotide sequencing methods that determines the order of the nucleotides that comprise the gene. Any of the components of the gene are potential targets for a trigger oligonucleotide and polynucleotides.

[0034] The trigger polynucleotide molecules are designed to modulate expression by inducing regulation or suppression of an endogenous ALS gene in a plant and are designed to have a nucleotide sequence essentially identical or essentially complementary to the nucleotide sequence of an endogenous ALS gene of a plant or to the sequence of RNA transcribed from an endogenous ALS gene of a plant, including a transgene in a plant that provides for a herbicide resistant ALS enzyme, which can be coding sequence or non-coding sequence. Effective molecules that modulate expression are referred to as “a trigger molecule, or trigger polynucleotide”. By “essentially identical” or “essentially complementary” is meant that the trigger polynucleotides (or at least one strand of a double-stranded polynucleotide or portion thereof, or a portion of a single strand polynucleotide) are designed to hybridize to the endogenous gene noncoding sequence or to RNA transcribed (known as messenger RNA or an RNA transcript) from the endogenous gene to effect regulation or suppression of expression of the endogenous gene. Trigger molecules are identified by “tiling” the gene targets with partially overlapping probes or non-overlapping probes of antisense or sense polynucleotides that are essentially identical or essentially complementary to the nucleotide sequence of an endogenous gene. Multiple target sequences can be aligned and sequence regions with homology in common, according to the methods of the present invention, are identified as potential trigger molecules for the multiple targets. Multiple trigger molecules of various lengths, for example 18-25 nucleotides, 26-50 nucleotides, 51-100 nucleotides, 101-200 nucleotides, 201-300 nucleotides or more can be pooled into a few treatments in order to investigate polynucleotide molecules that cover a portion of a gene sequence (for example, a portion of a coding versus a portion of a noncoding region, or a 5′ versus a 3′ portion of a gene) or an entire gene sequence including coding and noncoding regions of a target gene. Polynucleotide molecules of the pooled trigger molecules can be divided into smaller pools or single molecules in order to identify trigger molecules that provide the desired effect.

[0035] The target gene RNA and DNA polynucleotide molecules (Table 1, SEQ ID NO:1-45 and 1692-1788) are sequenced by any number of available methods and equipment. Some of the sequencing technologies are available commercially, such as the sequencing-by-hybridization platform from Affymetrix Inc. (Sunnyvale, Calif.) and the sequencing-by-synthesis platforms from 454 Life Sciences (Bradford, Conn.), Illumina/Solexa (Hayward, Calif.) and Helicos Biosciences (Cambridge, Mass.), and the sequencing-by-ligation platform from Applied Biosystems (Foster City, Calif.), as described below. In addition to the single molecule sequencing performed using sequencing-by-synthesis of Helicos Biosciences, other single molecule sequencing technologies are encompassed and include the SMRT™. technology of Pacific Biosciences, the Ion Torrent™. technology, and nanopore sequencing being developed for example, by Oxford Nanopore Technologies. An ALStarget gene comprising DNA or RNA can be isolated using primers or probes essentially complementary or essentially homologous to SEQ ID NO:1-45 and 1692-1788 or a fragment thereof. A polymerase chain reaction (PCR) gene fragment can be produced using primers essentially complementary or essentially homologous to SEQ ID NO:1-45 and 1692-1788 or a fragment thereof that is useful to isolate an ALS gene from a plant genome. SEQ ID NO: 1-45 and 1692-1788 or fragments thereof can be used in various sequence capture technologies to isolate additional target gene sequences, for example, including but not limited to Roche NimbleGen® (Madison, Wis.) and Streptavdin-coupled Dynabeads® (Life Technologies, Grand Island, N.Y.) and US20110015084, herein incorporated by reference in its entirety.

[0036] Embodiments of functional single-stranded polynucleotides have sequence complementarity that need not be 100 percent, but is at least sufficient to permit hybridization to RNA transcribed from the target gene or DNA of the target gene to form a duplex to permit a gene silencing mechanism. Thus, in embodiments, a polynucleotide fragment is designed to be essentially identical to, or essentially complementary to, a sequence of 18 or more contiguous nucleotides in either the target ALS gene sequence or messenger RNA transcribed from the target gene. By “essentially identical” is meant having 100 percent sequence identity or at least about 83, 84, 85, 86, 87, 88, 89, 90, 91, 92, 93, 94, 95, 96, 97, 98, or 99 percent sequence identity when compared to the sequence of 18 or more contiguous nucleotides in either the target gene or RNA transcribed from the target gene; by “essentially complementary” is meant having 100 percent sequence complementarity or at least about 83, 84, 85, 86, 87, 88, 89, 90, 91, 92, 93, 94, 95, 96, 97, 98, or 99 percent sequence complementarity when compared to the sequence of 18 or more contiguous nucleotides in either the target gene or RNA transcribed from the target gene. In some embodiments, polynucleotide molecules are designed to have 100 percent sequence identity with or complementarity to one allele or one family member of a given target gene (coding or non-coding sequence of a gene for of the present invention); in other embodiments the polynucleotide molecules are designed to have 100 percent sequence identity with or complementarity to multiple alleles or family members of a given target gene.

[0037] “Identity” refers to the degree of similarity between two polynucleic acid or protein sequences. An alignment of the two sequences is performed by a suitable computer program. A widely used and accepted computer program for performing sequence alignments is CLUSTALW v1.6 (Thompson, et al. Nucl. Acids Res., 22: 4673-4680, 1994). The number of matching bases or amino acids is divided by the total number of bases or amino acids, and multiplied by 100 to obtain a percent identity. For example, if two 580 base pair sequences had 145 matched bases, they would be 25 percent identical. If the two compared sequences are of different lengths, the number of matches is divided by the shorter of the two lengths. For example, if there are 100 matched amino acids between a 200 and a 400 amino acid protein, they are 50 percent identical with respect to the shorter sequence. If the shorter sequence is less than 150 bases or 50 amino acids in length, the number of matches are divided by 150 (for nucleic acid bases) or 50 (for amino acids), and multiplied by 100 to obtain a percent identity.

[0038] Trigger molecules for specific gene family members can be identified from coding and/or non-coding sequences of gene families of a plant or multiple plants, by aligning and selecting 200-300 polynucleotide fragments from the least homologous regions amongst the aligned sequences and evaluated using topically applied polynucleotides (as sense or anti-sense ssDNA or ssRNA, dsRNA, or dsDNA) to determine their relative effectiveness in inducing the herbicidal phenotype. The effective segments are further subdivided into 50-60 polynucleotide fragments, prioritized by least homology, and reevaluated using topically applied polynucleotides. The effective 50-60 polynucleotide fragments are subdivided into 19-30 polynucleotide fragments, prioritized by least homology, and again evaluated for induction of the herbicidal phenotype. Once relative effectiveness is determined, the fragments are utilized singly, or again evaluated in combination with one or more other fragments to determine the trigger composition or mixture of trigger polynucleotides for providing the herbicidal phenotype.

[0039] Trigger molecules for broad activity can be identified from coding and/or non-coding sequences of gene families of a plant or multiple plants, by aligning and selecting 200-300 polynucleotide fragments from the most homologous regions amongst the aligned sequences and evaluated using topically applied polynucleotides (as sense or anti-sense ssDNA or ssRNA, dsRNA, or dsDNA) to determine their relative effectiveness in inducing the herbicidal phenotype. The effective segments are subdivided into 50-60 polynucleotide fragments, prioritized by most homology, and reevaluated using topically applied polynucleotides. The effective 50-60 polynucleotide fragments are subdivided into 19-30 polynucleotide fragments, prioritized by most homology, and again evaluated for induction of the herbicidal phenotype. Once relative effectiveness is determined, the fragments may be utilized singly, or in combination with one or more other fragments to determine the trigger composition or mixture of trigger polynucleotides for providing the herbicidal phenotype.

[0040] Methods of making polynucleotides are well known in the art. Chemical synthesis, in vivo synthesis and in vitro synthesis methods and compositions are known in the art and include various viral elements, microbial cells, modified polymerases, and modified nucleotides. Commercial preparation of oligonucleotides often provides two deoxyribonucleotides on the 3′ end of the sense strand. Long polynucleotide molecules can be synthesized from commercially available kits, for example, kits from Applied Biosystems/Ambion (Austin, Tex.) have DNA ligated on the 5′ end in a microbial expression cassette that includes a bacterial T7 polymerase promoter that makes RNA strands that can be assembled into a dsRNA and kits provided by various manufacturers that include T7 RiboMax Express (Promega, Madison, Wis.), AmpliScribe T7-Flash (Epicentre, Madison, Wis.), and TranscriptAid T7 High Yield (Fermentas, Glen Burnie, Md.). dsRNA molecules can be produced from microbial expression cassettes in bacterial cells (Ongvarrasopone et al. ScienceAsia 33:35-39; Yin, Appl. Microbiol. Biotechnol 84:323-333, 2009; Liu et al., BMC Biotechnology 10:85, 2010) that have regulated or deficient RNase III enzyme activity or the use of various viral vectors to produce sufficient quantities of dsRNA. ALS gene fragments are inserted into the microbial expression cassettes in a position in which the fragments are express to produce ssRNA or dsRNA useful in the methods described herein to regulate expression on a target ALS gene. Long polynucleotide molecules can also be assembled from multiple RNA or DNA fragments. In some embodiments design parameters such as Reynolds score (Reynolds et al. Nature Biotechnology 22, 326-330 (2004), Tuschl rules (Pei and Tuschl, Nature Methods 3(9): 670-676, 2006), i-score (Nucleic Acids Res 35: e123, 2007), i-Score Designer tool and associated algorithms (Nucleic Acids Res 32: 936-948, 2004. Biochem Biophys Res Commun 316: 1050-1058, 2004, Nucleic Acids Res 32: 893-901, 2004, Cell Cycle 3: 790-5, 2004, Nat Biotechnol 23: 995-1001, 2005, Nucleic Acids Res 35: e27, 2007, BMC Bioinformatics 7: 520, 2006, Nucleic Acids Res 35: e123, 2007, Nat Biotechnol 22: 326-330, 2004) are known in the art and may be used in selecting polynucleotide sequences effective in gene silencing. In some embodiments the sequence of a polynucleotide is screened against the genomic DNA of the intended plant to minimize unintentional silencing of other genes.

[0041] Ligands can be tethered to a polynucleotide, for example a dsRNA, ssRNA, dsDNA or ssDNA. Ligands in general can include modifiers, e.g., for enhancing uptake; diagnostic compounds or reporter groups e.g., for monitoring distribution; cross-linking agents; nuclease-resistance conferring moieties; and natural or unusual nucleobases. General examples include lipophiles, lipids (e.g., cholesterol, a bile acid, or a fatty acid (e.g., lithocholic-oleyl, lauroyl, docosnyl, stearoyl, palmitoyl, myristoyl oleoyl, linoleoyl), steroids (e.g., uvaol, hecigenin, diosgenin), terpenes (e.g., triterpenes, e.g., sarsasapogenin, Friedelin, epifriedelanol derivatized lithocholic acid), vitamins (e.g., folic acid, vitamin A, biotin, pyridoxal), carbohydrates, proteins, protein binding agents, integrin targeting molecules, polycationics, peptides, polyamines, and peptide mimics. The ligand may also be a recombinant or synthetic molecule, such as a synthetic polymer, e.g., polyethylene glycol (PEG), PEG-40K, PEG-20K and PEG-5K. Other examples of ligands include lipophilic molecules, e.g, cholesterol, cholic acid, adamantane acetic acid, 1-pyrene butyric acid, dihydrotestosterone, glycerol (e.g., esters and ethers thereof, e.g., C.sub.10, C.sub.11, C.sub.12, C.sub.13, C.sub.14, C.sub.15, C.sub.16, C.sub.17, C.sub.18, C.sub.19, or C.sub.20 alkyl; e.g., lauroyl, docosnyl, stearoyl, oleoyl, linoleoyl 1,3-bis-O(hexadecyl)glycerol, 1,3-bis-O(octaadecyl)glycerol), geranyloxyhexyl group, hexadecylglycerol, borneol, menthol, 1,3-propanediol, heptadecyl group, palmitic acid, myristic acid, O3-(oleoyl)lithocholic acid, O3-(oleoyl)cholenic acid, dodecanoyl, lithocholyl, 5.beta.-cholanyl, N,N-distearyl-lithocholamide, 1,2-di-O-stearoylglyceride, dimethoxytrityl, or phenoxazine) and PEG (e.g., PEG-5K, PEG-20K, PEG-40K). Preferred lipophilic moieties include lipid, cholesterols, oleyl, retinyl, or cholesteryl residues.

[0042] Conjugating a ligand to a dsRNA can enhance its cellular absorption, lipophilic compounds that have been conjugated to oligonucleotides include 1-pyrene butyric acid, 1,3-bis-O-(hexadecyl)glycerol, and menthol. One example of a ligand for receptor-mediated endocytosis is folic acid. Folic acid enters the cell by folate-receptor-radiated endocytosis. dsRNA compounds bearing folic acid would be efficiently transported into the cell via the folate-receptor-mediated endocytosis. Other ligands that have been conjugated to oligonucleotides include polyethylene glycols, carbohydrate clusters, cross-linking agents, porphyrin conjugates, delivery peptides and lipids such as cholesterol. In certain instances, conjugation of a cationic ligand to oligonucleotides results in improved resistance to nucleases. Representative examples of cationic ligands are propylammonium and dimethylpropylammonium. Interestingly, antisense oligonucleotides were reported to retain their high binding affinity to mRNA when the cationic ligand was dispersed, throughout the oligonucleotide. See M. Manoharan Antisense & Nucleic Acid Drug Development 2002, 12, 103 and references therein.

[0043] A biologic delivery can be accomplished by a variety of methods including, without limitation, (1) loading liposomes with a dsRNA acid molecule provided herein and (2) complexing a dsRNA molecule with lipids or liposomes to form nucleic acid-lipid or nucleic acid-liposome complexes. The liposome can be composed of cationic and neutral lipids commonly used to transfect cells in vitro. Cationic lipids can complex (e.g., charge-associate) with negatively charged, nucleic acids to form liposomes. Examples of cationic liposomes include, without limitation, lipofectin, lipofectamine, lipofectace, and DOTAP. Procedures for forming liposomes are well known in the art. Liposome compositions can be formed, for example, from phosphatidylcholine, dimyristoyl phosphatidylcholine, dipalmitoyl phosphatidylcholine, dimyristoyl phosphatidyl glycerol, dioleoyl phosphatidylethanolamine or liposomes comprising dihydrosphingomyelin (DHSM) Numerous lipophilic agents are commercially available, including Lipofectin® (Invitrogen/Life Technologies, Carlsbad, Calif.) and Effectene™ (Qiagen, Valencia, Calif.), In addition, systemic delivery methods can be optimized using commercially available cationic lipids such as DDAB or DOTAP, each of which can be mixed with a neutral lipid such as DOPE or cholesterol. In some eases, liposomes such as those described by Templeton et al. (Nature Biotechnology, 15:647-652 (1997)) can be used. In other embodiments, polycations such as polyethyleneimine can be used to achieve delivery in vivo and ex vivo (Boletta et al., J. Am. Soc. Nephrol. 7:1728 (1996)). Additional information regarding the use of liposomes to deliver nucleic acids can be found in U.S. Pat. No. 6,271,359, PCT Publication WO 96/40964 and Morrissey, D. et al. 2005. Nat. Biotechnol. 23(8):1002-7.

[0044] In certain embodiments, an organosilicone preparation that is commercially available as Silwet® L-77 surfactant having CAS Number 27306-78-1 and EPA Number: CAL.REG.NO. 5905-50073-AA, and currently available from Momentive Performance Materials, Albany, N.Y. can be used to prepare a polynucleotide composition. In certain embodiments where a Silwet L-77 organosilicone preparation is used as a pre-spray treatment of plant leaves or other plant surfaces, freshly made concentrations in the range of about 0.015 to about 2 percent by weight (wt percent) (e.g., about 0.01, 0.015, 0.02, 0.025, 0.03, 0.035, 0.04, 0.045, 0.05, 0.055, 0.06, 0.065, 0.07, 0.075, 0.08, 0.085, 0.09, 0.095, 0.1, 0.2, 0.3, 0.4, 0.5, 0.6, 0.7, 0.8, 0.9, 1.0, 1.1, 1.2, 1.3, 1.4, 1.5, 1.6, 1.7, 1.8, 1.9, 2.0, 2.1, 2.2, 2.3, 2.5 wt percent) are efficacious in preparing a leaf or other plant surface for transfer of polynucleotide molecules into plant cells from a topical application on the surface. In certain embodiments of the methods and compositions provided herein, a composition that comprises a polynucleotide molecule and an organosilicone preparation comprising Silwet L-77 in the range of about 0.015 to about 2 percent by weight (wt percent) (e.g., about 0.01, 0.015, 0.02, 0.025, 0.03, 0.035, 0.04, 0.045, 0.05, 0.055, 0.06, 0.065, 0.07, 0.075, 0.08, 0.085, 0.09, 0.095, 0.1, 0.2, 0.3, 0.4, 0.5, 0.6, 0.7, 0.8, 0.9, 1.0, 1.1, 1.2, 1.3, 1.4, 1.5, 1.6, 1.7, 1.8, 1.9, 2.0, 2.1, 2.2, 2.3, 2.5 wt percent) is used or provided.

[0045] In certain embodiments, any of the commercially available organosilicone preparations provided such as the following Breakthru S 321, Breakthru S 200 Cat#67674-67-3, Breakthru OE 441 Cat#68937-55-3, Breakthru S 278 Cat #27306-78-1, Breakthru S 243, Breakthru S 233 Cat#134180-76-0, available from manufacturer Evonik Goldschmidt (Germany), Silwet® HS 429, Silwet® HS 312, Silwet® HS 508, Silwet® HS 604 (Momentive Performance Materials, Albany, N.Y.) can be used as transfer agents in a polynucleotide composition. In certain embodiments where an organosilicone preparation is used as a pre-spray treatment of plant leaves or other surfaces, freshly made concentrations in the range of about 0.015 to about 2 percent by weight (wt percent) (e.g., about 0.01, 0.015, 0.02, 0.025, 0.03, 0.035, 0.04, 0.045, 0.05, 0.055, 0.06, 0.065, 0.07, 0.075, 0.08, 0.085, 0.09, 0.095, 0.1, 0.2, 0.3, 0.4, 0.5, 0.6, 0.7, 0.8, 0.9, 1.0, 1.1, 1.2, 1.3, 1.4, 1.5, 1.6, 1.7, 1.8, 1.9, 2.0, 2.1, 2.2, 2.3, 2.5 wt percent) are efficacious in preparing a leaf or other plant surface for transfer of polynucleotide molecules into plant cells from a topical application on the surface. In certain embodiments of the methods and compositions provided herein, a composition that comprises a polynucleotide molecule and an organosilicone preparation in the range of about 0.015 to about 2 percent by weight (wt percent) (e.g., about 0.01, 0.015, 0.02, 0.025, 0.03, 0.035, 0.04, 0.045, 0.05, 0.055, 0.06, 0.065, 0.07, 0.075, 0.08, 0.085, 0.09, 0.095, 0.1, 0.2, 0.3, 0.4, 0.5, 0.6, 0.7, 0.8, 0.9, 1.0, 1.1, 1.2, 1.3, 1.4, 1.5, 1.6, 1.7, 1.8, 1.9, 2.0, 2.1, 2.2, 2.3, 2.5 wt percent) is used or provided.

[0046] Organosilicone preparations used in the methods and compositions provided herein can comprise one or more effective organosilicone compounds. As used herein, the phrase “effective organosilicone compound” is used to describe any organosilicone compound that is found in an organosilicone preparation that enables a polynucleotide to enter a plant cell. In certain embodiments, an effective organosilicone compound can enable a polynucleotide to enter a plant cell in a manner permitting a polynucleotide mediated suppression of a target gene expression in the plant cell. In general, effective organosilicone compounds include, but are not limited to, compounds that can comprise: i) a trisiloxane head group that is covalently linked to, ii) an alkyl linker including, but not limited to, an n-propyl linker, that is covalently linked to, iii) a poly glycol chain, that is covalently linked to, iv) a terminal group. Trisiloxane head groups of such effective organosilicone compounds include, but are not limited to, heptamethyltrisiloxane. Alkyl linkers can include, but are not limited to, an n-propyl linker Poly glycol chains include, but are not limited to, polyethylene glycol or polypropylene glycol. Poly glycol chains can comprise a mixture that provides an average chain length “n” of about “7.5”. In certain embodiments, the average chain length “n” can vary from about 5 to about 14. Terminal groups can include, but are not limited to, alkyl groups such as a methyl group. Effective organosilicone compounds are believed to include, but are not limited to, trisiloxane ethoxylate surfactants or polyalkylene oxide modified heptamethyl trisiloxane.

[chemical structure]

[0047] In certain embodiments, an organosilicone preparation that comprises an organosilicone compound comprising a trisiloxane head group is used in the methods and compositions provided herein. In certain embodiments, an organosilicone preparation that comprises an organosilicone compound comprising a heptamethyltrisiloxane head group is used in the methods and compositions provided herein. In certain embodiments, an organosilicone composition that comprises Compound I is used in the methods and compositions provided herein. In certain embodiments, an organosilicone composition that comprises Compound I is used in the methods and compositions provided herein. In certain embodiments of the methods and compositions provided herein, a composition that comprises a polynucleotide molecule and one or more effective organosilicone compound in the range of about 0.015 to about 2 percent by weight (wt percent) (e.g., about 0.01, 0.015, 0.02, 0.025, 0.03, 0.035, 0.04, 0.045, 0.05, 0.055, 0.06, 0.065, 0.07, 0.075, 0.08, 0.085, 0.09, 0.095, 0.1, 0.2, 0.3, 0.4, 0.5, 0.6, 0.7, 0.8, 0.9, 1.0, 1.1, 1.2, 1.3, 1.4, 1.5, 1.6, 1.7, 1.8, 1.9, 2.0, 2.1, 2.2, 2.3, 2.5 wt percent) is used or provided.

[0048] Compositions of the present invention include but are not limited components that are one or more polynucleotides essentially identical to, or essentially complementary to an ALS gene sequence (promoter, intron, exon, 5′ untranslated region, 3′ untranslated region), a transfer agent that provides for the polynucleotide to enter a plant cell, a herbicide that complements the action of the polynucleotide, one or more additional herbicides that further enhance the herbicide activity of the composition or provide an additional mode of action different from the complementing herbicide, various salts and stabilizing agents that enhance the utility of the composition as an admixture of the components of the composition.

[0049] In certain aspects, methods include one or more applications of a polynucleotide composition and one or more applications of a transfer agent for conditioning of a plant to permeation by polynucleotides. When the agent for conditioning to permeation is an organosilicone composition or compound contained therein, embodiments of the polynucleotide molecules are double-stranded RNA oligonucleotides, single-stranded RNA oligonucleotides, double-stranded RNA polynucleotides, single-stranded RNA polynucleotides, double-stranded DNA oligonucleotides, single-stranded DNA oligonucleotides, double-stranded DNA polynucleotides, single-stranded DNA polynucleotides, chemically modified RNA or DNA oligonucleotides or polynucleotides or mixtures thereof.

[0050] Compositions and methods of the invention are useful for modulating the expression of an endogenous ALS gene or transgenic ALS gene (for example, U.S. Pat. No. 7,973,218; SEQ ID NO:65 comprising a soybean HRA sequence; SEQ ID NO:66 comprising a maize HRA sequence; SEQ ID NO:67 comprising an Arabidopsis HRA sequence; and SEQ ID NO:86 comprising an HRA sequence used in cotton, herein incorporated by reference) gene in a plant cell. In various embodiments, an ALS gene includes coding (protein-coding or translatable) sequence, non-coding (non-translatable) sequence, or both coding and non-coding sequence. Compositions can include polynucleotides and oligonucleotides designed to target multiple genes, or multiple segments of one or more genes. The target gene can include multiple consecutive segments of a target gene, multiple non-consecutive segments of a target gene, multiple alleles of a target gene, or multiple target genes from one or more species.

[0051] Provided is a method for modulating expression of an ALS gene in a plant including (a) conditioning of a plant to permeation by polynucleotides and (b) treatment of the plant with the polynucleotide molecules, wherein the polynucleotide molecules include at least one segment of 18 or more contiguous nucleotides cloned from or otherwise identified from the target ALS gene in either anti-sense or sense orientation, whereby the polynucleotide molecules permeate the interior of the plant and induce modulation of the target gene. The conditioning and polynucleotide application can be performed separately or in a single step. When the conditioning and polynucleotide application are performed in separate steps, the conditioning can precede or can follow the polynucleotide application within minutes, hours, or days. In some embodiments more than one conditioning step or more than one polynucleotide molecule application can be performed on the same plant. In embodiments of the method, the segment can be cloned or identified from (a) coding (protein-encoding), (b) non-coding (promoter and other gene related molecules), or (c) both coding and non-coding parts of the target gene. Non-coding parts include DNA, such as promoter regions or the RNA transcribed by the DNA that provide RNA regulatory molecules, including but not limited to: introns, 5′ or 3′ untranslated regions, and microRNAs (miRNA), trans-acting siRNAs, natural anti-sense siRNAs, and other small RNAs with regulatory function or RNAs having structural or enzymatic function including but not limited to: ribozymes, ribosomal RNAs, t-RNAs, aptamers, and riboswitches.

[0052] Herbicide chemical families that are known as ALS inhibiting herbicides include members of the Sulfonylureas, Imidazolinones, Triazolopyrimidines, Pyrimidinyl(thio)benzoates, and Sulfonylaminocarbonyl-triazolinones.

[0053] All publications, patents and patent applications are herein incorporated by reference to the same extent as if each individual publication or patent application was specifically and individually indicated to be incorporated by reference.

[0054] The following examples are included to demonstrate examples of certain preferred embodiments of the invention. It should be appreciated by those of skill in the art that the techniques disclosed in the examples that follow represent approaches the inventors have found function well in the practice of the invention, and thus can be considered to constitute examples of preferred modes for its practice. However, those of skill in the art should, in light of the present disclosure, appreciate that many changes can be made in the specific embodiments that are disclosed and still obtain a like or similar result without departing from the spirit and scope of the invention.

### EXAMPLES

### Example 1

### Polynucleotides Related to the ALS Gene Sequences

[0055] The target ALS polynucleotide molecule is represented by a large subunit and a small subunit gene that naturally occurs in the genome of Amaranthus palmeri, Amaranthus rudis, Amaranthus chlorostachys, Amaranthus graecizans, Amaranthus hybridus, Amaranthus lividus, Amaranthus spinosus, Amaranthus thunbergii, Amaranthus viridis, Ambrosia trifida, Kochia scoparia, Abutilon theophrasti, Chenopodium album, Commelina diffusa, Conyza candensis Digitaria sanguinalis, Euphorbia heterophylla, Lolium multiflorum and include polynucleotide molecules related to the expression of a polypeptide identified as an ALS large subunit and ALS small subunit, that include regulatory molecules, cDNAs comprising coding and noncoding regions of an ALS large subunit gene and fragments thereof and ALS small subunit gene and fragments thereof as shown in Table 1 and SEQ ID NO:1-45 and 1692-1788.

[0056] Polynucleotide molecules were extracted from these plant species by methods standard in the field, for example, total RNA was extracted using Trizol Reagent (Invitrogen Corp, Carlsbad, Calif. Cat. No. 15596-018), following the manufacturer's protocol or modifications thereof by those skilled in the art of polynucleotide extraction that may enhance recover or purity of the extracted RNA. Briefly, start with 1 gram of ground plant tissue for extraction. Prealiquot 10 milliliters (mL) Trizol reagent to 15 mL conical tubes. Add ground powder to tubes and shake to homogenize. Incubate the homogenized samples for 5 minutes (min) at room temperature (RT) and then add 3 mL of chloroform. Shakes tubes vigorously by hand for 15-30 seconds (sec) and incubate at RT for 3 min. Centrifuge the tubes at 7,000 revolutions per minute (rpm) for 10 min at 4 degrees C. Transfer the aqueous phase to a new 1.5 mL tube and add 1 volume of cold isopropanol. Incubate the samples for 20-30 min at RT and centrifuge at 10,000 rpm for 10 min at 4 degrees C. Wash pellet with Sigma-grade 80 percent ethanol. Remove the supernatant and briefly air-dry the pellet. Dissolve the RNA pellet in approximately 200 microliters of DEPC treated water. Heat briefly at 65 degrees C. to dissolve pellet and vortex or pipet to resuspend RNA pellet. Adjust RNA concentration to 1-2 microgram/microliter.

[0057] DNA was extracted using EZNA SP Plant DNA Mini kit (Omega Biotek, Norcross Ga., Cat#D5511) and Lysing Matrix E tubes (Q-Biogen, Cat#6914), following the manufacturer's protocol or modifications thereof by those skilled in the art of polynucleotide extraction that may enhance recover or purity of the extracted DNA. Briefly, aliquot ground tissue to a Lysing Matrix E tube on dry ice, add 800 μl Buffer SP1 to each sample, homogenize in a bead beater for 35-45 sec, incubate on ice for 45-60 sec, centrifuge at ≧14000 rpm for 1 min at RT, add 10 microliter RNase A to the lysate, incubate at 65° C. for 10 min, centrifuge for 1 min at RT, add 280 μl Buffer SP2 and vortex to mix, incubate the samples on ice for 5 min, centrifuge at ≧10,000 g for 10 min at RT, transfer the supernatant to a homogenizer column in a 2 ml collection tube, centrifuge at 10,000 g for 2 min at RT, transfer the cleared lysate into a 1.5 ml microfuge tube, add 1.5 volumes Buffer SP3 to the cleared lysate, vortex immediately to obtain a homogeneous mixture, transfer up to 650 μl supernatant to the Hi-Bind column, centrifuge at 10,000 g for 1 min, repeat, apply 100 μl 65° C. Elution Buffer to the column, centrifuge at 10,000 g for 5 min at RT.

[0058] Next-generation DNA sequencers, such as the 454-FLX (Roche, Branford, Conn.), the SOLiD (Applied Biosystems,), and the Genome Analyzer (HiSeq2000, Illumina, San Diego, Calif.) were used to provide polynucleotide sequence from the DNA and RNA extracted from the plant tissues. Raw sequence data was assembled into contigs. The contig sequence was used to identify trigger molecules that can be applied to the plant to enable regulation of the gene expression.

### Example 2

### Polynucleotides Related to the ALS Gene Trigger Molecules

[0059] The gene sequences and fragments of Table 1 were divided into 200 polynucleotide (200-mer) lengths with 25 polynucleotide overlapping regions (SEQ ID NO: 46-1363 and 1789-4166). These polynucleotides are tested to select the most efficacious trigger regions across the length of any target sequence. The trigger polynucleotides are constructed as sense or anti-sense ssDNA or ssRNA, dsRNA, or dsDNA, or dsDNA/RNA hybrids and combined with an organosilicone based transfer agent to provide a polynucleotide preparation. The polynucleotides are combined into sets of two to three polynucleotides per set, using 4-8 nmol of each polynucleotide. Each polynucleotide set is prepared with the transfer agent and applied to a plant or a field of plants in combination with a ALS inhibitor herbicide, or followed by a ALS inhibitor treatment one to three days after the polynucleotide application, to determine the effect on the plant's susceptibility to ALS inhibitor. The effect is measured as stunting the growth and/or killing of the plant and is measured 8-14 days after treatment with the polynucleotide set and ALS inhibitor. The most efficacious sets are identified and the individual polynucleotides are tested in the same methods as the sets are and the most efficacious single 200-mer identified. The 200-mer sequence is divided into smaller sequences of 50-70-mer regions with 10-15 polynucleotide overlapping regions and the polynucleotides tested individually. The most efficacious 50-70-mer is further divided into smaller sequences of 25-mer regions with a 12 to 13 polynucleotide overlapping region and tested for efficacy in combination with ALS inhibitor treatment. By this method it is possible to identify an oligonucleotide or several oligonucleotides that are the most efficacious trigger molecule to effect plant sensitivity to an ALS inhibitor or modulation of ALS gene expression. The modulation of ALS gene expression is determined by the detection of ALS siRNA molecules specific to ALS gene or by an observation of a reduction in the amount of ALS RNA transcript produced relative to an untreated plant or by merely observing the anticipated phenotype of the application of the trigger with an ALS inhibiting herbicide. Detection of siRNA can be accomplished, for example, using kits such as mirVana (Ambion, Austin Tex.) and mirPremier (Sigma-Aldrich, St Louis, Mo.).

[0060] The gene sequences and fragments of Table 1 are compared and 21-mers of contiguous polynucleotides are identified that have homology across the various ALS gene sequences. The purpose is to identify trigger molecules that are useful as herbicidal molecules or in combination with an ALS inhibitor herbicide across a broad range of weed species. The sequences SEQ ID NO: 1364-1691 and 4167-4201 represent the 21-mers that are present in the ALS large subunit and small subunit genes of at least seven of the weed species of Table 1. It is contemplated that additional 21-mers can be selected from the sequences of Table 1 that are specific for a single weed species or a few weeds species within a genus or trigger molecules that are at least 18 contiguous nucleotides, at least 19 contiguous nucleotides, at least 20 contiguous nucleotides or at least 21 contiguous nucleotides in length and at least 85 percent identical to an ALS large subuintgene sequence or ALS small subunit gene sequence or a combination of both selected from the group consisting of SEQ ID NO:1-45 and 1692-1788.

[0061] By this method it is possible to identify an oligonucleotide or several oligonucleotides that are the most efficacious trigger molecule to effect plant sensitivity to an ALS inhibitor or modulation of ALS gene expression. The modulation of ALS gene expression is determined by the detection of ALS siRNA molecules specific to ALS gene or by an observation of a reduction in the amount of ALS RNA transcript produced relative to an untreated plant. Detection of siRNA can be accomplished, for example, using kits such as mirVana (Ambion, Austin Tex.) and mirPremier (Sigma-Aldrich, St Louis, Mo.).

### Example 3

### Methods Related to Treating Plants or Plant Parts with a Topical Mixture of the Trigger Molecules for ALS Gene Expression Modulation

[0062] Single stranded or double stranded DNA or RNA fragments in sense or antisense orientation are identified and mixed with a transfer agent and other components in the composition of the invention. This composition is topically applied to plants to effect expression of the target ALS genes in the specified plant to obtain the desired effect on growth or development.

[0063] In this example, growing Amaranthus palmeri plants were treated with a topically applied composition for inducing modulation of a target gene in a plant including (a) an agent for conditioning of a plant to transfer of the polynucleotides and (b) polynucleotides including at least one ssDNA polynucleotide strand including at least one segment of 18-21 contiguous nucleotides of the target gene in sense (S) orientation. Amaranthus palmeri plants were treated with a topically applied adjuvant solution comprising a pool of ssDNA ALS2 oligonucleotides shown in Table 2 that are essentially homologous or essentially complementary to the Amaranthus palmeri ALS2 gene promoter sequence, 0.5% Silwet L-77 solution, 2% ammonium sulfate and 20 mM sodium phosphate buffer (pH 6.8). The name of the each trigger molecule is in the left column and the sequence of the trigger molecule is shown in the right column.

TABLE 2
ssDNA-ALS2 promoter trigger polynucleotides

| Oligo name | DNA sequence | SEQ ID NO: |
|---|---|---|
| ALS_PRO_S1 | TCTTCTCCGACTCTCACAA | 4202 |
| ALS_PRO_S2 | TCTTCCACCCTCTCTAATG | 4203 |
| ALS_PRO_S3 | GGTGGAAAGATTGGAACTT | 4204 |
| ALS_PRO_S4 | TCGTTTGTGGGTTTGTAAG | 4205 |
| ALS_PRO_S5 | GCAATGGAAGTTTCTGCAA | 4206 |
| ALS_PRO_S6 | AGTTCCTGTTTCAGCTCAT | 4207 |
| ALS_PRO_S7 | TGTATGTCAAGGTTTAGGTTG | 4208 |
| ALS_PRO_S8 | GCAATAAGGTGATGGCGTG | 4209 |
| ALS_PRO_S9 | GCGCCTCCACTATCTTCTT | 4210 |
| ALS_PRO_S10 | GCTTTCCTCTCGCACTAAT | 4211 |
| ALS_PRO_S11 | CCATTTACGCTATCCCTTT | 4212 |
| ALS_PRO_S12 | CCCACTTCTTCTTCTTCAA | 4213 |
| ALS_PRO_S13 | CCTAAACCTAAACCTCCTT | 4214 |
| ALS_PRO_S14 | TGTTCTCGTTGAAGCTCTT | 4215 |
| ALS_PRO_S15 | GGAAATCCATCAAGCTCTT | 4216 |
| ALS_PRO_S16 | GGAGTTTGTATTGCCACTT | 4217 |

[0064] Approximately four-week old greenhouse grown Amaranthus palmeri plants (glyphosate-resistant Palmer amaranth, “R-22”) were used in this assays. The plants were spray treated in a greenhouse with the ssDNA ALS2 oligonucleotide composition/0.5% Silwet L-77 solution/2% ammonium sulfate/20 mM sodium phosphate, concentration of the each oligonucleotide was approximately 16 nmol. Spray solutions were prepared the same day as spraying and applied using a track sprayer with a FLATfan nozzle 9501E at 165 psi (pounds/square inch) at a rate of 93 g/ha (grams/hectare). The ssDNA ALS2 oligonucleotide composition was applied and followed 24 hours later by the herbicide treatment, Staple® (2-Chloro-6-{(4,6-dimethoxy-2-pyrimidinyl)thio}benzoic acid sodium salt, pyrithiobac sodium 85 percent, Dupont, Wilmington, Del.) at ¼×(27 g ai/ha (grams active ingredient per hectare) rate for the ssDNA ALS2 oligonucleotide treated plants and 1× rate (108 g ai/ha) for the untreated plants, five replications per treatment and the data is presented as percentage height of the untreated control. Plant height is determined at seven days after herbicide treatment.

[0065] The resulting plants treated with Staple® alone at 27 g ai/ha (¼× field rate) showed moderate growth stunting, causing between 30 percent and 35 percent growth reduction compared to the untreated control. Plants treated with Staple® at 108 g ai/ha (1× field rate) showed 40 percent growth reduction. Plants treated with ssDNA ALS2 oligonucleotides followed by Staple® at 27 g ai/ha at 1 h or 24 h showed a significant increase in growth stunting compared to Staple® alone. Thus, ssDNA ALS2 oligonucleotide treatment followed by Staple® at 1 h and 24 h caused 50 percent and 60 percent growth reduction, relative to the untreated control, while Staple® alone at 27 (1 h and 24 h) and 108 (24 h) g ai/ha caused 35 percent, 30 percent, and 40 percent growth reduction, respectively. A photograph of the treated plants is shown in FIG. 1. Individual trigger molecules enhancing ALS inhibitor herbicide enhancing activity were selected by repeating the testing with the individual oligonucleotides or combinations thereof, for example, ALS_pro 51 (SEQ ID NO:4202) was determined to be an effective trigger molecule. ALS_pro 51 dsDNA trigger molecule was applied to ALS inhibitor resistant Palmer amaranth plants (A3, ALS inhibitor herbicide biotype) followed by ALS inhibitor herbicides 1× Staple® at 108 g ai/ha or 2× Classic® (Chlorimuron Ethyl 25DF, Dupont, Willmington, Del., 2× rate is 70 g ai/ha) at +COC (crop oil concentrate) 24 hr after trigger application. The results of the treatment demonstrates that the ALS_pro_S1 trigger molecule substantially improved the activity of the Staple® and Classic® herbicides on ALS inhibitor resistant plants, FIG. 2.

### Example 4

### Tiling Test of Pooled Trigger Molecule to ALS Large Subunit

[0066] Pools of trigger molecules (ALStile) were tested across the ALS large subunit gene to select for effective trigger molecules. Approximately four-week old (3-4 inches tall) greenhouse grown Amaranthus palmeri plants (Palmer amaranth A3) were used in these assays. The plants were spray treated in a greenhouse with the ALStile composition, each composition having six trigger oligonucleotides (Table 3) and a formulation comprising 1 percent Silwet L-77 solution, 2 percent ammonium sulfate and 20 mM sodium phosphate and the concentration of each oligonucleotide was approximately 4 nmol. Spray solutions were prepared the same day as spraying and applied using a track sprayer with a FLATfan nozzle 9501E at 165 psi (pounds/square inch) at a rate of 93 g/ha (grams/hectare). The dsDNA ALStile pool oligonucleotide composition was applied and followed 24 hours later by the herbicide treatment, Staple® (2-Chloro-6-{(4,6-dimethoxy-2-pyrimidinyl)thio}benzoic acid sodium salt, pyrithiobac sodium 85 percent, Dupont, Wilmington, Del.) at 108 g/ha (grams per hectare), five replications per treatment and the data is presented as a visual score of percentage injury determined fourteen days after herbicide application.

[0067] The results of these test identified three pools with herbicide enhancing activity relative to the formulation control on the A3 biotype, these were ALStile13-18 (SEQ ID NO:4218-4223), ALStile19-24 (SEQ ID NO:4224-4229) and ALStile61-66 (SEQ ID NO:4230-4235) and ALSpro_S1 (SEQ ID NO:4202, identified as an effective trigger from Example 3). Individual effective trigger molecules can be isolated from the pools and combined as necessary with other selected effective trigger molecules to enhance ALS inhibiting herbicide activity.

TABLE 3
Trigger molecule tiling test for Palmer amaranth ALS large subunit gene

| Trigger | type | Herbicide | Rep1 | Rep2 | Rep3 | Rep4 | Rep5 | avg |
|---|---|---|---|---|---|---|---|---|
| ALStile1-6 | dsDNA | Staple @ 108 g/ha | 20 | 35 | 60 | 20 | 15 | 30 |
| ALStile7-12 | dsDNA | Staple @ 108 g/ha | 25 | 80 | 80 | 70 | 20 | 55 |
| ALStile13-18 | dsDNA | Staple @ 108 g/ha | 25 | 90 | 95 | 95 | 80 | 77 |
| ALStile19-24 | dsDNA | Staple @ 108 g/ha | 15 | 80 | 98 | 95 | 95 | 76 |
| ALStile25-30 | dsDNA | Staple @ 108 g/ha | 0 | 35 | 95 | 95 | 85 | 62 |
| ALStile31-36 | dsDNA | Staple @ 108 g/ha | 10 | 5 | 70 | 95 | 10 | 38 |
| ALStile37-42 | dsDNA | Staple @ 108 g/ha | 3 | 3 | 0 | 85 | 75 | 33 |
| ALStile43-48 | dsDNA | Staple @ 108 g/ha | 5 | 8 | 50 | 10 | 0 | 14 |
| ALStile53-54 | dsDNA | Staple @ 108 g/ha | 3 | 15 | 90 | 85 | 10 | 40 |
| ALStile55,57-60 | dsDNA | Staple @ 108 g/ha | 3 | 15 | 98 | 99 | 15 | 46 |
| ALStile61-66 | dsDNA | Staple @ 108 g/ha | 10 | 50 | 99 | 100 | 90 | 70 |
| ALStile67-72 | dsDNA | Staple @ 108 g/ha | 10 | 10 | 85 | 98 | 85 | 57 |
| ALStile73-78 | dsDNA | Staple @ 108 g/ha | 15 | 0 | 60 | 80 | 20 | 35 |
| ALStile79-84 | dsDNA | Staple @ 108 g/ha | 15 | 10 | 15 | 80 | 30 | 30 |
| ALStile85-88 | dsDNA | Staple @ 108 g/ha | 3 | 0 | 0 | 0 | 0 | 0.6 |
| ALStile89-92 | dsDNA | Staple @ 108 g/ha | 0 | 0 | 0 | 0 | 3 | 0.6 |
| ALSpro_S1 | dsRNA | Staple @ 108 g/ha | 100 | 100 | 100 | 100 | 100 | 100 |
| formulation | | Staple @ 108 g/ha | 85 | 80 | 60 | 50 | 10 | 57 |
| Untreated | | | 0 | 0 | 0 | 0 | 0 | 0 |

### Example 5

### Tiling Test of Pooled Trigger Molecules to ALS Small Subunit Gene

[0068] Pools of trigger molecules (ALSprotile) were tested to query across the ALS small subunit gene promoter to select for effective trigger molecules. Approximately, 2-4 inches tall R-22 greenhouse grown Amaranthus palmeri plants (R-22) were used in these assays. The plants were spray treated in a greenhouse with the ALSprotile composition, each composition having six trigger oligonucleotides (Table 4) and a formulation comprising 1 percent Silwet L-77 solution, 2 percent ammonium sulfate and 20 mM sodium phosphate and the concentration of each oligonucleotide was approximately 4 nmol. Spray solutions were prepared the same day as spraying and applied using a track sprayer with a FLATfan nozzle 9501E at 165 psi (pounds/square inch) at a rate of 93 g/ha (grams/hectare). The dsDNA ALSprotile pool oligonucleotide composition was applied and followed 24 hours later by the herbicide treatment, Staple® at 108 g/ha (grams per hectare), five replications per treatment and the data is presented as a visual score of percentage injury determined fourteen days after herbicide application. The results of these tests identified two pools with herbicide enhancing activity relative to the formulation control on the A3 biotype, these were ALSprotilel-6 (SEQ ID NO:4236-4241) and ALSprotile7-12 (SEQ ID NO:4242-4247) which demonstrated 67 percent and 62 percent injury, respectfully. Individual effective trigger molecules can be isolated from the pools and combined as necessary with other selected effective trigger molecules to enhance ALS inhibiting herbicide activity.

TABLE 4
Trigger molecule tiling test for Palmer amaranth ALS small subunit gene promoter

| Trigger | type | Herbicide | Rep1 | Rep2 | Rep3 | Rep4 | Rep5 | avg |
|---|---|---|---|---|---|---|---|---|
| ALSprotile1-6 | dsDNA | Staple @ 108 g/ha | 45 | 100 | 50 | 75 | 65 | 67 |
| ALStile7-12 | dsDNA | Staple @ 108 g/ha | 50 | 75 | 20 | 100 | 65 | 62 |
| ALStile13-18 | dsDNA | Staple @ 108 g/ha | 55 | 30 | 65 | 60 | 80 | 58 |
| ALStile19-24 | dsDNA | Staple @ 108 g/ha | 30 | 40 | 75 | 60 | 70 | 55 |
| formulation | | Staple @ 108 g/ha | 60 | 45 | 45 | 55 | 40 | 49 |

### Example 6

### A Method to Control Weeds in a Field

[0069] A method to control weeds in a field comprises the use of trigger polynucleotides that can modulate the expression of an ALS gene in one or more target weed plant species. An analysis of ALS gene sequences from eighteen plant species provided a collection of 21-mer polynucleotides that can be used in compositions to affect the growth or develop or sensitivity to ALS inhibitor herbicide to control multiple weed species in a field. A composition containing 1 or 2 or 3 or 4 or more of the polynucleotides of SEQ ID NO: 1364-1691 and 4167-4201 would enable broad activity of the composition against the multiple weed species that occur in a field environment.

[0070] The method includes creating a composition that comprises components that include at least one polynucleotide of SEQ ID NO: 1364-1691 and 4167-4201 or any other effective gene expression modulating polynucleotide essentially identical or essentially complementary to SEQ ID NO:1-45 and 1692-1788 or fragment thereof, a transfer agent that mobilizes the polynucleotide into a plant cell and a ALS inhibiting herbicide and optionally a polynucleotide that modulates the expression of an essential gene and optionally a co-herbicide that has a different mode of action relative to an ALS inhibitor herbicide, or a co-herbicide that has a similar mode of action of any one ALS inhibitor herbicide and is a member of a different chemical family. The polynucleotide of the composition includes a dsRNA, ssDNA or dsDNA or a combination thereof. A composition containing a polynucleotide can have a use rate of about 1 to 30 grams or more per acre depending on the size of the polynucleotide and the number of polynucleotides in the composition. The composition may include one or more additional herbicides as needed to provide effective multi-species weed control. For example, a composition comprising an ALS gene trigger oligonucleotide, the composition further including a co-herbicide but not limited to acetochlor, acifluorfen, acifluorfen-sodium, aclonifen, acrolein, alachlor, alloxydim, allyl alcohol, ametryn, amicarbazone, amidosulfuron, aminopyralid, amitrole, ammonium sulfamate, anilofos, asulam, atraton, atrazine, azimsulfuron, BCPC, beflubutamid, benazolin, benfluralin, benfuresate, bensulfuron, bensulfuron-methyl, bensulide, bentazone, benzfendizone, benzobicyclon, benzofenap, bifenox, bilanafos, bispyribac, bispyribac-sodium, borax, bromacil, bromobutide, bromoxynil, butachlor, butafenacil, butamifos, butralin, butroxydim, butylate, cacodylic acid, calcium chlorate, cafenstrole, carbetamide, carfentrazone, carfentrazone-ethyl, CDEA, CEPC, chlorflurenol, chlorflurenol-methyl, chloridazon, chlorimuron, chlorimuron-ethyl, chloroacetic acid, chlorotoluron, chlorpropham, chlorsulfuron, chlorthal, chlorthal-dimethyl, cinidon-ethyl, cinmethylin, cinosulfuron, cisanilide, clethodim, clodinafop, clodinafop-propargyl, clomazone, clomeprop, clopyralid, cloransulam, cloransulam-methyl, CMA, 4-CPB, CPMF, 4-CPP, CPPC, cresol, cumyluron, cyanamide, cyanazine, cycloate, cyclosulfamuron, cycloxydim, cyhalofop, cyhalofop-butyl, 2,4-D, 3,4-DA, daimuron, dalapon, dazomet, 2,4-DB, 3,4-DB, 2,4-DEB, desmedipham, dicamba, dichlobenil, ortho-dichlorobenzene, para-dichlorobenzene, dichlorprop, dichlorprop-P, diclofop, diclofop-methyl, diclosulam, difenzoquat, difenzoquat metilsulfate, diflufenican, diflufenzopyr, dimefuron, dimepiperate, dimethachlor, dimethametryn, dimethenamid, dimethenamid-P, dimethipin, dimethylarsinic acid, dinitramine, dinoterb, diphenamid, diquat, diquat dibromide, dithiopyr, diuron, DNOC, 3,4-DP, DSMA, EBEP, endothal, EPTC, esprocarb, ethalfluralin, ethametsulfuron, ethametsulfuron-methyl, ethofumesate, ethoxyfen, ethoxysulfuron, etobenzanid, fenoxaprop-P, fenoxaprop-P-ethyl, fentrazamide, ferrous sulfate, flamprop-M, flazasulfuron, florasulam, fluazifop, fluazifop-butyl, fluazifop-P, fluazifop-P-butyl, flucarbazone, flucarbazone-sodium, flucetosulfuron, fluchloralin, flufenacet, flufenpyr, flufenpyr-ethyl, flumetsulam, flumiclorac, flumiclorac-pentyl, flumioxazin, fluometuron, fluoroglycofen, fluoroglycofen-ethyl, flupropanate, flupyrsulfuron, flupyrsulfuron-methyl-sodium, flurenol, fluridone, fluorochloridone, fluoroxypyr, flurtamone, fluthiacet, fluthiacet-methyl, fomesafen, foramsulfuron, fosamine, glufosinate, glufosinate-ammonium, halosulfuron, halosulfuron-methyl, haloxyfop, haloxyfop-P, HC-252, hexazinone, imazamethabenz, imazamethabenz-methyl, imazamox, imazapic, imazapyr, imazaquin, imazethapyr, imazosulfuron, indanofan, iodomethane, iodosulfuron, iodosulfuron-methyl-sodium, ioxynil, isoproturon, isouron, isoxaben, isoxachlortole, isoxaflutole, karbutilate, lactofen, lenacil, linuron, MAA, MAMA, MCPA, MCPA-thioethyl, MCPB, mecoprop, mecoprop-P, mefenacet, mefluidide, mesosulfuron, mesosulfuron-methyl, mesotrione, metam, metamifop, metamitron, metazachlor, methabenzthiazuron, methylarsonic acid, methyldymron, methyl isothiocyanate, metobenzuron, metolachlor, S-metolachlor, metosulam, metoxuron, metribuzin, metsulfuron, metsulfuron-methyl, MK-66, molinate, monolinuron, MSMA, naproanilide, napropamide, naptalam, neburon, nicosulfuron, nonanoic acid, norflurazon, oleic acid (fatty acids), orbencarb, orthosulfamuron, oryzalin, oxadiargyl, oxadiazon, oxasulfuron, oxaziclomefone, oxyfluorfen, paraquat, paraquat dichloride, pebulate, pendimethalin, penoxsulam, pentachlorophenol, pentanochlor, pentoxazone, pethoxamid, petrolium oils, phenmedipham, phenmedipham-ethyl, picloram, picolinafen, pinoxaden, piperophos, potassium arsenite, potassium azide, pretilachlor, primisulfuron, primisulfuron-methyl, prodiamine, profluazol, profoxydim, prometon, prometryn, propachlor, propanil, propaquizafop, propazine, propham, propisochlor, propoxycarbazone, propoxycarbazone-sodium, propyzamide, prosulfocarb, prosulfuron, pyraclonil, pyraflufen, pyraflufen-ethyl, pyrazolynate, pyrazosulfuron, pyrazosulfuron-ethyl, pyrazoxyfen, pyribenzoxim, pyributicarb, pyridafol, pyridate, pyriftalid, pyriminobac, pyriminobac-methyl, pyrimisulfan, pyrithiobac, pyrithiobac-sodium, quinclorac, quinmerac, quinoclamine, quizalofop, quizalofop-P, rimsulfuron, sethoxydim, siduron, simazine, simetryn, SMA, sodium arsenite, sodium azide, sodium chlorate, sulcotrione, sulfentrazone, sulfometuron, sulfometuron-methyl, sulfosate, sulfosulfuron, sulfuric acid, tar oils, 2,3,6-TBA, TCA, TCA-sodium, tebuthiuron, tepraloxydim, terbacil, terbumeton, terbuthylazine, terbutryn, thenylchlor, thiazopyr, thifensulfuron, thifensulfuron-methyl, thiobencarb, tiocarbazil, topramezone, tralkoxydim, tri-allate, triasulfuron, triaziflam, tribenuron, tribenuron-methyl, tricamba, triclopyr, trietazine, trifloxysulfuron, trifloxysulfuron-sodium, trifluralin, triflusulfuron, triflusulfuron-methyl, trihydroxytriazine, tritosulfuron, [3-[2-chloro-4-fluoro-5-(-methyl-6-trifluoromethyl-2,4-dioxo-,2,3,44-etrahydropyrimidin-3-yl)phenoxy]-2-pyridyloxy]acetic acid ethyl ester (CAS RN 353292-3-6), 4-[(4,5-dihydro-3-methoxy-4-methyl-5-oxo)-H-,2,4-triazol-1-ylcarbonyl-sulfamoyl]-5-methylthiophene-3-carboxylic acid (BAY636), BAY747 (CAS RN 33504-84-2), topramezone (CAS RN 2063-68-8), 4-hydroxy-3-[[2-[(2-methoxyethoxy)methyl]-6-(trifluoro-methyl)-3-pyridi-nyl]carbonyl]-bicyclo[3.2.]oct-3-en-2-one (CAS RN 35200-68-5), and 4-hydroxy-3-[[2-(3-methoxypropyl)-6-(difluoromethyl)-3-pyridinyl]carbon-yl]-bicyclo[3.2.]oct-3-en-2-one.

[0071] A field of crop plants in need of weed plant control is treated by spray application of the composition. The composition can be provided as a tank mix, a sequential treatment of components (generally the polynucleotide followed by the herbicide), a simultaneous treatment or mixing of one or more of the components of the composition from separate containers. Treatment of the field can occur as often as needed to provide weed control and the components of the composition can be adjusted to target specific weed species or weed families.

### Example 7

### Herbicidal Compositions Comprising Pesticidal Agents

[0072] A method of controlling weeds and plant pest and pathogens in a field of ALS inhibitor tolerant crop plants is provided, wherein the method comprises applying a composition comprising an ALS trigger polynucleotide, an ALS inhibitor herbicide composition and an admixture of a pest control agent. For example, the admixture comprises insecticides, fungicides, nematocides, bactericides, acaricides, growth regulators, chemosterilants, semiochemicals, repellents, attractants, pheromones, feeding stimulants or other biologically active compounds or biological agents, such as, microorganisms.

[0073] For example, the admixture comprises a fungicide compound for use on an ALS herbicide tolerant crop plant to prevent or control plant disease caused by a plant fungal pathogen, The fungicide compound of the admixture may be a systemic or contact fungicide or mixtures of each. More particularly the fungicide compound includes, but is not limited to members of the chemical groups strobilurins, triazoles, chloronitriles, carboxamides and mixtures thereof. The composition may additional have an admixture comprises an insecticidal compound or agent.

[0074] Agricultural chemicals are provided in containers suitable for safe storage, transportation and distribution, stability of the chemical compositions, mixing with solvents and instructions for use. A container of the compositions of the present invention may include mixture of a trigger oligonucleotide+ALS inhibitor herbicide+fungicide compound, or a mixture of a trigger oligonucleotide+ALS inhibitor herbicide compound and an insecticide compound, or a trigger oligonucleotide+a ALS inhibitor herbicide compound and a fungicide compound and an insecticide compound (for example, lambda-cyhalothrin, Warrier®). The container may further provide instructions on the effective use of the mixture. Containers of the present invention can be of any material that is suitable for the storage of the chemical mixture. Containers can be of any material that is suitable for the shipment of the chemical mixture. The material can be of cardboard, plastic, metal, or a composite of these materials. The container can have a volume of 0.5 liter, 1 liter, 2 liter, 3-5 liter, 5-10 liter, 10-20 liter, 20-50 liter or more depending upon the need. A tank mix of a trigger oligonucleotide+ALS inhibitor herbicide compound and a fungicide compound is provided, methods of application to the crop to achieve an effective dose of each compound are known to those skilled in the art and can be refined and further developed depending on the crop, weather conditions, and application equipment used.

[0075] Insecticides, fungicides, nematocides, bactericides, acaricides, growth regulators, chemosterilants, semiochemicals, repellents, attractants, pheromones, feeding stimulants or other biologically active compounds can be added to the trigger oligonucleotide to form a multi-component pesticide giving an even broader spectrum of agricultural protection. Examples of such agricultural protectants with which compounds of this invention can be formulated are: insecticides such as abamectin, acephate, azinphos-methyl, bifenthrin, buprofezin, carbofuran, chlorfenapyr, chlorpyrifos, chlorpyrifos-methyl, cyfluthrin, beta-cyfluthrin, cyhalothrin, lambda-cyhalothrin, deltamethrin, diafenthiuron, diazinon, diflubenzuron, dimethoate, esfenvalerate, fenoxycarb, fenpropathrin, fenvalerate, fipronil, flucythrinate, tau-fluvalinate, fonophos, imidacloprid, isofenphos, malathion, metaldehyde, methamidophos, methidathion, methomyl, methoprene, methoxychlor, methyl 7-chloro-2,5-dihydro-2-[[N-(methoxycarbonyl)-N-[4-(trifluoromethoxy)phenyl]amino]carbonyl]indeno[1,2-e][1,3,4]oxadiazine-4-a(3H)-carboxylate (DPX-JW062), monocrotophos, oxamyl, parathion, parathion-methyl, permethrin, phorate, phosalone, phosmet, phosphamidon, pirimicarb, profenofos, rotenone, sulprofos, tebufenozide, tefluthrin, terbufos, tetrachlorvinphos, thiodicarb, tralomethrin, trichlorfon and triflumuron; most preferably a glyphosate compound is formulated with a fungicide compound or combinations of fungicides, such as azoxystrobin, benomyl, blasticidin-S, Bordeaux mixture (tribasic copper sulfate), bromuconazole, captafol, captan, carbendazim, chloroneb, chlorothalonil, copper oxychloride, copper salts, cymoxanil, cyproconazole, cyprodinil (CGA 219417), diclomezine, dicloran, difenoconazole, dimethomorph, diniconazole, diniconazole-M, dodine, edifenphos, epoxiconazole (BAS 480F), famoxadone, fenarimol, fenbuconazole, fenpiclonil, fenpropidin, fenpropimorph, fluazinam, fluquinconazole, flusilazole, flutolanil, flutriafol, folpet, fosetyl-aluminum, furalaxyl, hexaconazole, ipconazole, iprobenfos, iprodione, isoprothiolane, kasugamycin, kresoxim-methyl, mancozeb, maneb, mepronil, metalaxyl, metconazole, S-methyl 7-benzothiazolecarbothioate (CGA 245704), myclobutanil, neo-asozin (ferric methanearsonate), oxadixyl, penconazole, pencycuron, probenazole, prochloraz, propiconazole, pyrifenox, pyroquilon, quinoxyfen, spiroxamine (KWG4168), sulfur, tebuconazole, tetraconazole, thiabendazole, thiophanate-methyl, thiram, triadimefon, triadimenol, tricyclazole, trifloxystrobin, triticonazole, validamycin and vinclozolin; combinations of fungicides are common for example, cyproconazole and azoxystrobin, difenoconazole, and metalaxyl-M, fludioxonil and metalaxyl-M, mancozeb and metalaxyl-M, copper hydroxide and metalaxyl-M, cyprodinil and fludioxonil, cyproconazole and propiconazole; commercially available fungicide formulations for control of Asian soybean rust disease include, but are not limited to Quadris® (Syngenta Corp), Bravo® (Syngenta Corp), Echo 720® (Sipcam Agro Inc), Headline® 2.09EC (BASF Corp), Tilt® 3.6EC (Syngenta Corp), PropiMax™ 3.6EC (Dow AgroSciences), Bumper® 41.8EC (MakhteshimAgan), Folicur® 3.6F (Bayer CropScience), Laredo® 25EC (Dow AgroSciences), Laredo™ 25EW (Dow AgroSciences), Stratego® 2.08F (Bayer Corp), Domark™ 125SL (Sipcam Agro USA), and Pristine®38% WDG (BASF Corp) these can be combined with compositions as described in the present invention to provide enhanced protection from soybean rust disease; nematocides such as aldoxycarb and fenamiphos; bactericides such as streptomycin; acaricides such as amitraz, chinomethionat, chlorobenzilate, cyhexatin, dicofol, dienochlor, etoxazole, fenazaquin, fenbutatin oxide, fenpropathrin, fenpyroximate, hexythiazox, propargite, pyridaben and tebufenpyrad; and biological agents such as Bacillus thuringiensis, Bacillus thuringiensis delta endotoxin, baculovirus, and entomopathogenic bacteria, virus and fungi.

TABLE 1
Acetolactate synthase gene cDNA and gDNA contig sequences

| SEQ | | | | |
|---|---|---|---|---|
| ID NO | SPECIES | TYPE | LENGTH | SEQ |
| 1 | Amaranthus | cDNA | 534 | ATAATTATTTGGTGTTAGATGTTGAGGATATCCTAGAATTGTTAAGG |
| | chlorostachys | Contig | | AAGCTTTCTGTTAGCTAATTCTGGTAGACCTGGACCTGTTTTGATTG |
| | | | | ATATCCTAAAGATATTCAGCAACAATTAGTTGTTCCAATTGGGAACA |
| | | | | GCCCAATTAAATTGGGTGGGTATCTTTCTAGGTTGCCTAAACTCACT |
| | | | | TCAACTGCTAATTAAGAGGGACTTCTTGATCAAATTGTGAGGTTGGT |
| | | | | GGGTGAAGAAACCATTGATGAAGATGGGCGAAGAATTCAAATCAA |
| | | | | TGTTGTGGTTTTGAAGGTTTTGTTGTGAAGGTTTTTTTTAAGTGCCA |
| | | | | TTAATGAAGAGGTTTAAGGAAGAAACCATAATGGGGAGGTTGAGG |
| | | | | AAGAAGGTGATGAAGATGATAACCTGCTGTTTCAGGTTACTAAAAC |
| | | | | CGACTACACCTTTAAAAGCGAAGACCCCCAAAGTTCGAGCCTTTAA |
| | | | | AAGATAAACGCAAGTTTAAACCTCTAAAAGCAAATGAGCTAAAGTT |
| | | | | CGTACCTTTTAAATCAAATTTTCC |
| 2 | Amaranthus | cDNA | 500 | CGGGCACATACATACCTCGGGAATCCTTCCAATTCTTCCGAAATCTT |
| | chlorostachys | Contig | | CCCGGATATGCTCAAATTTGCTGAAGCATGTGATATACCAGCAGCC |
| | | | | CGTGTTACCAAGGTGAGCGATTTAAGGACTGCAATTCAAACAATGT |
| | | | | TGGATACTCCAGGACCGTATCTGCTGGATGTAATCGTACCACATCA |
| | | | | GGAGCATGTGCTGCCTATGATCCCTAGCGGTGCCGCCTTCAAGGAC |
| | | | | ACCATAACAGAGGGTGATGGAAGAAGGGCTTATTAGTTGGTTGGA |
| | | | | GATCTTTATAGAGGAGAAGCTTTTTTGTATGTATGTTAGTAGTTCCA |
| | | | | TAAACTTCTATATTCTCTGGCCGTTCTCTCGTTTAGCTGTTTTTATGTT |
| | | | | AGTTTGTTGTTTTCATGTTGCTTGCTACTTTGAAAAACCCTTTTGTGT |
| | | | | TTTAGACCCATTAGCATGAATAATCTTCCTATATTATTGTATGGTTCG |
| | | | | ATACACGCTAGTTGTTTCTTTGTATTATCGAG |
| 3 | Amaranthus | cDNA | 2267 | TTCCTTCTCAGTGATTCCCTTTCTCCATTTTCGCTTAGCTCTCCTCTCA |
| | graecizans | Contig | | CACTAATTACCTCCATTTCCAACCTTCCAAGCTTTCAACAATGGCGTC |
| | | | | CACTTCTTCAAACCCACCATTTTCCTCTTTTACTAAACCTAACAAAAT |
| | | | | CCCTAATCTTCAATCCTCCATTTACGCTCTCCCTTTTTCCAATTCTCTT |
| | | | | AAACCCACTTCTTCTTCTTCAATCCTCCGCCGCCCTCTTCAAATCTCAT |
| | | | | CATCTTCTTCTCAATCACCTAAACCTAAACCTCCTTCCGCTACTATAA |
| | | | | TTCAATCACCATCTCTCACCGATGATAAACCCTCTTCTTTTTTTTCCCG |
| | | | | ATTTAGCCCTGAAGAACCCAGAAAAGGTTGCGATGTTCTTGTTGAA |
| | | | | GCTCTTGAACGTGAAGGTGTTACCGATGTTTTTGCTTACCCTGGTGG |
| | | | | AGCTTCCATGGAAATCCATCAAGCTCTTACTCGTTCTAATATCATTAG |
| | | | | AAATGTTCTTCCTCGACATGAACAAGGTGGGTTTTCGCTGCTGAAG |
| | | | | GCTACGCTCGTGCTACTGGACGTGTTGGAGTTTGTATTGCTACTTCT |
| | | | | GGTCCAGGTGCTACTAATCTTGTCTCTGGTCTTGCTGATGCCCTTCTT |
| | | | | GACTCAGTCCCGCTTGTCGCCATTACTGGGCAAGTTCCTCGGCGTAT |
| | | | | GATCGGTACTGATGCTTTTCAAGAGACTCCTATTGTTGAGGTAACTC |
| | | | | GATCGATTACTAAGCATAATTATCTGGTGTTAGATGTTGAGGATATC |
| | | | | CCTAGAATTGTTAAGGAAGCTTTCTTTTTAGCTAATTCTGGTAGACC |
| | | | | TGGACCTGTTTTGATTGATATTCCTAAAGATATTCAGCAACAATTGG |
| | | | | TTGTTCCTAATTGGGAACAGCCTATTAAATTAGGTGGGTATCTTTCT |
| | | | | AGGTTGCCTAAACCCACTTATTCTGCTAATGAAGAGGGGCTTCTTGA |
| | | | | TCAAATTGTGAGGTTAGTGGGTGAGGCTAAGAGACCTGTGCTGTAT |
| | | | | ACTGGAGGTGGGTGTTTGAATTCTAGTGAAGAATTAAGGAAATTTG |
| | | | | TCGAGTTGACAGGGATTCCGGTTGCTAGTACTTTAATGGGGTTGGG |
| | | | | GGCTTTCCCTTGTACTGATGATTTGTCCCTTCATATGTTGGGAATGC |
| | | | | ACGGGACTGTGTACGCGAATTACGCGGTTGATAAGGCTGATTTATT |
| | | | | GCTTGCTTTCGGGGTTAGGTTTGATGATCGAGTGACTGGGAAGCTT |
| | | | | GAGGCGTTTGCTAGCCGGGCTAAGATTGTGCACATCGATATCGATT |
| | | | | CTGCTGAAATCGGGAAGAATAAGCAACCTCATGTGTCGATTTGTGG |
| | | | | TGATGTTAAAGTGGCATTACAGGGGTTGAATAAGATTTTGGAATCT |
| | | | | AGAAAAGGAAAGGTGAAATTGGATTTCTCTAATTGGAGGGAGGAA |
| | | | | TTGAATGAGCAGAAAAAGAAGTTTCCTTTGAGTTTTAAGACTTTCGG |
| | | | | GGACGCAATTCCTCCGCAATATGCCATTCAGGTGCTTGACGAGTTG |
| | | | | ACAAAGGGTGATGCGGTTGTAAGTACCGGTGTTGGGCAGCACCAA |
| | | | | ATGTGGGCTGCCCAATTCTATAAGTACCGAAATCCTCGCCAATGGCT |
| | | | | GACCTCGGGTGGTTTGGGGGCTATGGGGTTTGGTCTACCAGCCGCT |
| | | | | ATTGGAGCTGCTGTTGCTCGACCAGATGCGGTGGTTGTAGACATTG |
| | | | | ATGGGGATGGGAGTTTTATCATGAATGTTCAAGAATTGGCTACGAT |
| | | | | TAGGGTGGAGAATCTCCCGGTTAAAATCATGCTCTTGAACAATCAA |
| | | | | CATTTAGGTATGGTTGTTCAATGGGAAGATCGATTTTACAAAGCTAA |
| | | | | CCGGGCACATACATACCTCGGGAATCCTTCTAATTCTTCCGAAATCT |
| | | | | TCCCGGATATGCTCAAATTTGCTGAAGCATGTGATATACCAGCAGCC |
| | | | | CGTGTTACCAAGGTGAGCGATTTAAGGGCTGCAATTCAAACAATGT |
| | | | | TGGATACTCCAGGACCATATCTGCTGGATGTAATCGTACCACATCAG |
| | | | | GAGCATGTGCTGCCTATGATCCCTAGCGGCGCCGCCTTCAAGGACA |
| | | | | CCATCACAGAGGGTGATGGAAGAAGGGCTTATTAGTTGGTTGGAG |
| | | | | ATCTTTATAGAGGAGAAGCTTTTTTGTATGTATGTTAGTAGTTCCAT |
| | | | | AAACTTCTATATTCTCTGGCCGTTCTCTCGTTTAGCTGTTTTTATGTTA |
| | | | | GTTTGTTGTTTTCATGTTGCTTGTTACTTTGAAAAACCCTTTTGTGTTT |
| | | | | AAGACCCATTAGCATAG |
| 4 | Amaranthus | cDNA | 2572 | TTACCTTCATTTCCAACCTTTCAAGCTTTCAACAATGGCGTCCACTTC |
| | hybridus | Contig | | TTCAAACCCACCATTTTCCTCTTTTACTAAACCTAACAAAATCCCTAA |
| | | | | TCTGCAATCATCCATTTACGCTATCCCTTTTTCCAATTCTCTTAAACCC |
| | | | | ACTTCTTCTTCTTCAATCCTCCGCCGCCCTCTTCAAATCTCATCATCTT |
| | | | | CTTCTCAATCACCTAAACCTAAACCTCCTTCCGCTACTATAACTCAAT |
| | | | | CACCTTCGTCTCTCACCGATGATAAACCCTCTTCTTTTGTTTCCCGAT |
| | | | | TTAGCCCTGAAGAACCCAGAAAAGGTTGCGATGTTCTCGTTGAAGC |
| | | | | TCTTGAACGTGAAGGTGTTACCGATGTTTTTGCTTACCCTGGTGGAG |
| | | | | CATCCATGGAAATTCATCAAGCTCTTACTCGTTCTAATATCATTAGAA |
| | | | | ATGTTCTTCCTCGACATGAACAAGGTGGGGTTTTCGCTGCTGAAGG |
| | | | | CTACGCTCGTGCTACTGGACGCGTTGGAGTTTGTATTGCCACTTCTG |
| | | | | GTCCAGGTGCTACTAATCTTGTTTCTGGTCTTGCTGATGCACTTCTTG |
| | | | | ACTCAGTCCCTCTTGTCGCCATTACTGGGCAAGTTCCCCGGCGTATG |
| | | | | ATTGGTACTGATGCTTTTCAAGAGACTCCAATTGTTGAGGTAACTCG |
| | | | | ATCCATTACCAAGCATAATTATTTGGTGTTAGATGTTGAGGATATTC |
| | | | | CTAGAATTGTTAAGGAAGCTTTCTTTTTAGCTAATTCTGGTAGACCT |
| | | | | GGACCTGTTTTGATTGATATTCCTAAAGATATTCAGCAACAATTAGT |
| | | | | TGTTCCTAATTGGGAACAGCCCATTAAATTGGGTGGGTATCTTTCTA |
| | | | | GGTTGCCTAAACCCACTTATTCTGCTAATGAAGAGGGACTTCTTGAT |
| | | | | CAAATTGTAAGGTTAGTGGGTGAGTCTAAGAGACCTGTGCTGTATA |
| | | | | CTGGAGGTGGGTGTTTGAATTCTAGTGAAGAATTGAGGAAATTTGT |
| | | | | CGAATTGACAGGTATTCCGGTGGCTAGTACTTTAATGGGGTTGGGG |
| | | | | GCTTTCCCTTGTACTGATGATTTATCTCTTCATATGTTGGGAATGCAC |
| | | | | GGGACTGTGTACGCGAATTACGCGGTTGATAAGGCCGATTTGTTGC |
| | | | | TTGCTTTTGGGGTTAGGTTTGATGATCGAGTGACTGGTAAGCTCGA |
| | | | | GGCGTTTGCTAGCCGGGCTAAGATTGTGCACATCGATATCGATTCT |
| | | | | GCTGAAATCGGGAAGAATAAGCAACCTCATGTGTCGATTTGTGGTG |
| | | | | ATGTTAAAGTGGCATTACAGGGGTTGAATAAGATTTTGGAATCTAG |
| | | | | AAAAGGAAAGGTGAAATTGGATTTCTCTAATTGGAGGGAGGAGTT |
| | | | | GAATGAGCAGAAAAAGAAGTTTCCTTTGAGTTTTAAGACTTTCGGG |
| | | | | GATGCAATTCCTCCGCAATACGCCATTCAGGTTCTTGACGAGTTGAC |
| | | | | GAAGGGCGATGCGGTTGTAAGTACTGGTGTTGGGCAGCACCAAAT |
| | | | | GTGGGCTGCCCAATTCTATAAGTACCGAAATCCTCGCCAATGGCTG |
| | | | | ACCTCGGGTGGTTTGGGGGCTATGGGGTTTGGTCTACCAGCTGCTA |
| | | | | TTGGAGCTGCTGTTGCTCGACCAGATGCGGTGGTTGTAGACATTGA |
| | | | | TGGGGATGGGAGTTTTATCATGAATGTTCAAGAGTTGGCTACGATT |
| | | | | AGGGTAGAGAATCTCCCGGTTAAAATCATGCTCTTGAACAATCAAC |
| | | | | ATTTAGGTATGGTTGTTCAATGGGAAGATCGATTTTACAAAGCTAAC |
| | | | | CGGGCACATACATACCTCGGGAATCCTTCCAATTCTTCCGAAATCTT |
| | | | | CCCGGATATGCTCAAATTTGCTGAAGCATGTGATATACCAGCAGCC |
| | | | | CGTGTTACCAAGGTGAGCGATTTAAGGGCTGCAATTCAAACAATGT |
| | | | | TGGATACTCCAGGACCGTATCTGCTGGATGTAATCGTACCACATCA |
| | | | | GGAGCATGTGCTGCCTATGATCCCTAGCGGTGCCGCCTTCAAGGAC |
| | | | | ACCATAACAGAGGGTGATGGAAGAAGGGCTTATTAGTTGGTTGGA |
| | | | | GATCTTTATAGAGGAGAAGCTTTTTTGTATGTATGTTAGTAGTTCCA |
| | | | | TAAACTTCTATATTCTCTGGCCGTTCTCTCGTTTAGCTGTTTTTATGTT |
| | | | | AGTTTGTTGTTTTCATGTTGCTTGCTACTTTGAAAAACCCTTTTGTGT |
| | | | | TTTAGACCCATTAGCATGAATAATCTTCCTATATTATTGTATGGTTCG |
| | | | | ATACA |
| 5 | Amaranthus | cDNA | 2572 | CGCCTCCACTCTGGGTGATTCCCTTTCTCCATTCTCGCTTAGCTTTCC |
| | lividus | Contig | | TCTCACACAAATTACCTTTATTTCCAACCTTTCAAGCTTTCAACAATG |
| | | | | GCGTCCACTTCTTCAAACCCACCATTTTCCTCTTTTACTAAACCTAAC |
| | | | | AAAATCCCTAATCTGCAATCATCCATTTACGCTATCCCTTTTTCCAAT |
| | | | | TCTCTTAAACCCACTTCTTCTTCTTCAATCCTCCGCCGCCCTCTTCAAA |
| | | | | TCTCATCATCTTCTTCTCAATCACCTAAACCTAAACCTCCTTCCGCTAC |
| | | | | TATAACTCAATCACCTTCGTCTCTCACCGATGATAAACCCTCTTCTTT |
| | | | | TGTTTCCCGATTTAGCCCTGAAGAACCCAGAAAAGGTAGCGATGTT |
| | | | | CTCGTTGAAGCTCTTGAACGTGAAGGTGTTACCGATGTTTTTGCTTA |
| | | | | CCCTGGTGGAGCATCCATGGAAATTCATCAAGCTCTTACTCGTTCTA |
| | | | | ATATCATTAGAAATGTTCTTCCTCGACATGAACAAGGTGGGGTTTTC |
| | | | | GCTGCTGAAGGCTACGCTCGTGCTACTGGACGCGTTGGAGTTTGTA |
| | | | | TTGCCACTTCTGGTCCAGGTGCTACTAATCTTGTTTCTGGTCTTGCTG |
| | | | | ATGCACTTCTTGACTCAGTCCCTCTTGTCGCCATTACTGGGCAAGTT |
| | | | | CCCCGGCGTATGATTGGTACTGATGCTTTTCAAGAGACTCCAATTGT |
| | | | | TGAGGTAACTCGATCCATTACCAAGCATAATTATTTGGTGTTAGATG |
| | | | | TTGAGGATATTCCTAGAATTGTTAAGGAAGCTTTCTTTTTAGCTAATT |
| | | | | CTGGTAGACCTGGACCTGTTTTGATTGATATTCCTAAAGATATTCAG |
| | | | | CAACAATTAGTTGTTCCTAATTGGGAACAGCCCATTAAATTGGGTG |
| | | | | GGTATCTTTCTAGGTTGCCTAAACCCACTTATTCTGCTAATGAAGAG |
| | | | | GGACTTCTTGATCAAATTGTAAGGTTAGTGGGTGAGTCTAAGAGAC |
| | | | | CTGTGCTGTATACTGGAGGTGGGTGTTTGAATTCTAGTGAAGAATT |
| | | | | GAGGAAATTTGTCGAATTGACAGGTATTCCGGTGGCTAGTACTTTA |
| | | | | ATGGGGTTGGGGGCTTTCCCTTGTACTGATGATTTATCTCTTCATAT |
| | | | | GTTGGGAATGCACGGGACTGTGTACGCGAATTACGCGGTTGATAA |
| | | | | GGCCGATTTGTTGCTTGCTTTTGGGGTTAGGTTTGATGATCGAGTG |
| | | | | ACTGGTAAGCTCGAGGCGTTTGCTAGCCGGGCTAAGATTGTGCACA |
| | | | | TCGATATCGATTCTGCTGAAATCGGGAAGAATAAGCAACCTCATGT |
| | | | | GTCGATTTGTGGTGATGTTAAAGTGGCATTACAGGGGTTGAATAAG |
| | | | | ATTTTGGAATCTAGAAAAGGAAAGGTGAAATTGGATTTCTCTAATT |
| | | | | GGAGGGAGGAGTTGAATGAGCAGAAAAAGAAGTTTCCTTTGAGTT |
| | | | | TTAAGACTTTCGGGGATGCTATTCCTCCGCAATACGCCATTCAGGTT |
| | | | | CTTGACGAGTTGACGAAGGGCGATGCGGTTGTAAGTACTGGTGTTG |
| | | | | GGCAGCACCAAATGTGGGCTGCCCAATTCTATAAGTACCGAAATCC |
| | | | | TCGCCAATGGCTGACCTCGGGTGGTTTGGGGGCTATGGGGTTTGGT |
| | | | | CTACCAGCTGCTATTGGAGCTGCTGTTGCTCGACCAGATGCGGTGG |
| | | | | TTGTAGACATTGATGGGGATGGGAGTTTTATCATGAATGTTCAAGA |
| | | | | GTTGGCTACGATTAGGGTAGAGAATCTCCCGGTTAAAATCATGCTC |
| | | | | TTGAACAATCAACATTTAGGTATGGTTGTTCAATGGGAAGATCGATT |
| | | | | TTACAAAGCTAACCGGGCACATACATACCTCGGGAATCCTTCCAATT |
| | | | | CTTCCGAAATCTTCCCGGATATGCTCAAATTTGCTGAAGCATGTGAT |
| | | | | ATACCAGCAGCCCGTGTTACCAAGGTGAGCGATTTAAGGGCTGCAA |
| | | | | TTCAAACAATGTTGGATACTCCAGGACCGTATCTGCTGGATGTAATC |
| | | | | GTACCACATCAGGAGCATGTGCTGCCTATGATCCCTAGCGGTGCCG |
| | | | | CCTTCAAGGACACCATAACAGAGGGTGATGGAAGAAGGGCTTATT |
| | | | | AGTTGGTTGGAGATCTTTATAGAGGAGAAGCT |
| 6 | Amaranthus | cDNA | 2348 | TCCCTTTCTCCATTTTCGCTTAGCTTTCCTCTCACACAAATTACCTCCA |
| | palmeri | Contig | | TTTCCAACCCTCCAAGCTTTCAACAATGGCGTCCACTTCAACAAACC |
| | | | | CACCATTTTCCTCTTTTACTAAACCTAACAAAATCCCTAATCTGCAAT |
| | | | | CATCCATTTACGCTATCCCTTTTTCCAATTCTCTTAAACCCACTTCTTC |
| | | | | TTCTTCAATCCTCCGCCGCCCTCTTCAAATCTCATCATCTTCTTCTCAA |
| | | | | TCACCTAAACCTAAACCTCCTTCCGCTACTATAACTCAATCACCTTCA |
| | | | | TCTCTCACCGATGATAAACCCTCTTCTTTTGTTTCCCGATTTAGCCCT |
| | | | | GAAGAACCCAGAAAAGGTTGCGATGTTCTCGTTGAAGCTCTTGAAC |
| | | | | GTGAAGGTGTTACCGATGTTTTTGCTTACCCTGGTGGAGCATCCATG |
| | | | | GAAATCCATCAAGCTCTTACTCGTTCTAATATCATTAGAAATGTTCTT |
| | | | | CCTCGACATGAACAAGGTGGGGTTTTCGCTGCTGAAGGCTACGCTC |
| | | | | GTGCTACTGGACGCGTTGGAGTTTGTATTGCCACTTCTGGTCCAGGT |
| | | | | GCTACTAATCTTGTTTCTGGTCTTGCTGATGCACTTCTTGACTCAGTC |
| | | | | CCGCTTGTCGCCATTACTGGGCAAGTTCCCCGGCGTATGATTGGTAC |
| | | | | TGATGCTTTCCAAGAGACTCCAATTGTTGAGGTAACTCGATCCATTA |
| | | | | CTAAGCATAATTATTTGGTGTTAGATGTTGAGGATATTCCTAGAATT |
| | | | | GTTAAGGAAGCTTTCTTTTTAGCTAATTCTGGTAGACCTGGACCTGT |
| | | | | TTTGATTGATATTCCTAAAGATATTCAGCAACAATTAGTTGTTCCTAA |
| | | | | TTGGGAACAGCCCATTAAATTGGGTGGGTATCTTTCTAGGTTGCCTA |
| | | | | AACCCACTTATTCTGCTAATGAAGAGGGACTTCTTGATCAAATTGTA |
| | | | | AGGTTAGTGGGTGAGTCTAAGAGACCTGTGCTGTATACTGGAGGT |
| | | | | GGGTGTTTGAATTCTAGTGAAGAATTGAGGAAATTTGTCGAATTGA |
| | | | | CAGGGATTCCGGTGGCTAGTACTTTAATGGGGTTGGGGGCTTTCCC |
| | | | | TTGTACTGATGATTTATCACTTCATATGTTGGGAATGCACGGGACTG |
| | | | | TGTATGCGAATTACGCGGTTGATAAGGCCGATTTGTTGCTTGCTTTC |
| | | | | GGGGTTAGGTTTGATGATCGAGTGACTGGTAAGCTCGAGGCGTTT |
| | | | | GCTAGCCGGGCTAAGATTGTGCACATCGATATCGATTCTGCTGAAA |
| | | | | TCGGGAAGAATAAGCAACCTCATGTGTCGATTTGTGGTGATGTTAA |
| | | | | AGTGGCATTACAGGGGTTGAATAAGATTTTGGAATCTAGAAAAGG |
| | | | | AAAGGTGAAATTGGATTTCTCTAATTGGAGGGAGGAGTTGAATGA |
| | | | | GCAGAAAAAGAAGTTTCCTTTGAGTTTTAAGACTTTCGGGGATGCA |
| | | | | ATTCCTCCGCAATACGCCATTCAGGTTCTTGACGAGTTGACGAAGG |
| | | | | GTGATGCGGTTGTAAGTACCGGTGTTGGGCAGCACCAAATGTGGG |
| | | | | CTGCCCAATTCTATAAGTACCGAAATCCTCGCCAATGGCTGACCTCG |
| | | | | GGTGGTTTGGGGGCTATGGGGTTTGGTCTACCAGCTGCAATTGGA |
| | | | | GCTGCTGTTGCTCGACCAGATGCGGTGGTTGTAGACATTGATGGGG |
| | | | | ATGGGAGTTTTATCATGAATGTTCAAGAGTTGGCTACGATTAGGGT |
| | | | | GGAGAATCTCCCGGTTAAAATCATGCTCTTGAACAATCAACATTTAG |
| | | | | GTATGGTTGTTCAATGGGAAGATCGATTTTACAAAGCTAACCGGGC |
| | | | | ACATACATACCTCGGGAATCCTTCCAATTCTTCCGAAATCTTCCCGG |
| | | | | ATATGCTCAAATTCGCTGAAGCATGTGATATACCAGCAGCTCGTGTT |
| | | | | ACCAAGGTGAGCGATTTAAGGGCTGCAATTCAAACAATGTTGGATA |
| | | | | CTCCAGGACCGTATCTGCTGGATGTAATCGTACCACATCAGGAGCA |
| | | | | TGTGCTGCCTATGATCCCTAGCGGTGCCGCCTTCAAGGACACCATCA |
| | | | | CAGAGGGTGATGGAAGAAGGGCTTATTAGTTGGTTGGAGATCTTTA |
| | | | | TAGAGGAGAAGCTTTTTTGTATGTATGTTAGTATTTCCATAAACTTCT |
| | | | | ATATTCTCTGGCCGGCCTCTCGTTTAGCTGTTTTTATGTTAGTTTGTT |
| | | | | GTTTTCATGTTGCTTGCTACTTTGAAAAACCCTTGTGTTTTAGACCCA |
| | | | | TTAGCATGAATAATCATCCTATATTATTGTATGGTTTGATACACGCTA |
| | | | | GTTGTTTCTTTTTATCATCGAGATAAAGACAACTACTAATCGGTGTA |
| | | | | ACCACTGT |
| 7 | Amaranthus | gDNA | 6061 | TGATCATGAAATTAGTTTGAGGAATCGTTTTTTCGAGTACTGAAGAC |
| | palmeri | Contig | | TAGAAAGGAACTTGAGACATCAGTTTGGGAATTCGATGGAGTAGC |
| | | | | GGATCGTTCTTCACTTTTTGCTCGGGAGGTATCAATGGCGTAAATTT |
| | | | | TTTTTGGAGACTGACTCAAATGGGATTCTTTGTGTAGTGTACAGCTT |
| | | | | CACTTACCACAGGAACACAGGTGTTTTTTGCTATATAGGTACAGAAA |
| | | | | CTCGGAAAAGTCCACATTTACTCTATAACTTCATTTACGGTCTAAAA |
| | | | | GTAGTTGAGAAGGTAAAATTTAGGATGCAATTTTTTGAAAGCTTTCT |
| | | | | ATGATAGCAAATTCTTACTTTTTATTTCTACTGGTAATTGTCATTTTG |
| | | | | TCAATGTCCTTTGCAAAGACTAATTTTACAGACTTGTTATTTTCGTTT |
| | | | | AAAATGTTTCGTATGATACCGAACCAGAAAGAGAAACAAGAAATTC |
| | | | | GGGCGAATTTTTCTCGTCATATGTTAGATCGAAACCATATGATCAGC |
| | | | | TTGATCTTGGTTGTACTGGTGTATTGATTTTCATGGTAAATGTCAAT |
| | | | | ATTTTCATGGTAAACAACTTGGGTGCCAATTTTGTTAGGGTTAGATT |
| | | | | TGGTGCTGCTTTTGAATCAGAGATGAAATCAGCCGAGAAATGAAGA |
| | | | | TAAATTGGGGTGATTTTGCAAAATAGTTTGTCTGTTAATTTTAACTTA |
| | | | | TATTTGTTACATTCTTTGTTACTTGCACCATTGTTGACTTTGGTACTAT |
| | | | | TCATCAAGCAAATCGACTTTCATATTGTCGGTAATCTATAAAATAAA |
| | | | | ATATAGTTTTCTGAGATCTTGTTGAATCGTCTCGATTCAACGGTTATT |
| | | | | AATTTTTAGTTTTCATAATTTTTTGATATGTATAATAAAAGATATTAA |
| | | | | CAATTGATATCCTGTATTTGGGGTACGAAAAAGCAAATAGTGCAAG |
| | | | | TAAAAAAGAACGGAGGAAGTACATGTACAATTATCACTCAACTATT |
| | | | | AGATAAATTAGTTGGTTGAGATAAATCGTTAGAACTTAGAAATCAC |
| | | | | CAAATCTATAATAAGCTTTTCGCATTAGCGTGTTTGATATCAGCTGC |
| | | | | TTAGTTGATGAAATTAGATGGTTAAATCACTCGCTTGAAGCTATCAC |
| | | | | TTATCAACCGTTTGTCAAAGATCCTTGCATTTTAATTCATTGTGACTT |
| | | | | GTGAGATAGATCTATATGAAGAATTTAAATTTTAACAATAAGCGTTT |
| | | | | TAATATTTAAAGCTGGTGTTTTGATAAATTTAATTAAACTATTTAGAT |
| | | | | AAGTTCGGACTGTCTCTTCATGAGAGATGAGACTGTATCAATCAGCT |
| | | | | AATTTATAATCACCTAAATATCTCCTTATCATCATAATACATCCACCT |
| | | | | CATAAAATCTATAACCAGAATCTAAAAGAGGGATGGAAGACGACA |
| | | | | AGTCAACCCCTCACCTAATCATGTCTTTGATGTTAATAGCATAAAAG |
| | | | | CACATGAGTGATGAGAACAAACACATCAACCCTAATCTTATCCAAG |
| | | | | AAAATACCCCATTAGGCATTAAGGTCCTTTTCTTTTGTTTTCTTTTGC |
| | | | | CCTAAAAAGCAAAAGTGGAAAGAAACCCAAAAAAATCAATTTCACG |
| | | | | TTGCAAATTGTCAAATTTTTTTATAAAAAAAAATGAAAAATCTTTATA |
| | | | | CCACAAAAACAAAAAGCAACAATGAAAATTTAGAATCATACTCCCG |
| | | | | TTTCAATTTACTTGCAACAGTTACGCAGTTTAATACACTAATTCAATC |
| | | | | CTTAATATCTATAATTATAAATAATAAAAAATTATAAAAATTTAATAT |
| | | | | TAATAATCTTTGCAATGAGATGAATCAAACAAGATTTCACTAATAAA |
| | | | | TAATGTCATTTTTTTATATGTTGCAACTGATATGGAACAGAGAAAGT |
| | | | | ATCAATCTTGATATTCAAGGGTATTTAAGTAATTACAGAACAACCAT |
| | | | | TGTTATTTGTTAAGCGCCTCCACTCATTTCTTCTTCCTTCTCAGTTATT |
| | | | | CCATTTCTCCATTTTCGCTTAGCTTTCCTCTCACACAAATTACCTCCAT |
| | | | | TTCCAACCTTTCAAGCTTTCAACAATGGCGTCCACTTCAACAAACCC |
| | | | | ACCATTTTCCTCTTTTACTAAACCTAACAAAATCCCTAATCTGCAATC |
| | | | | ATCCATTTACGCTATCCCTTTTTCCAATTCTCTTAAACCCACTTCTTCT |
| | | | | TCTTCAATCCTCCGCCGCCCTCTTCAAATCTCATCATCTTCTTCTCAAT |
| | | | | CACCTAAACCTAAACCTCCTTCCGCTACTATAACTCAATCACCTTCAT |
| | | | | CTCTCACCGATGATAAACCCTCTTCTTTTGTTTCCCGATTTAGCCCTG |
| | | | | AAGAACCCAGAAAAGGTTGCGATGTTCTCGTTGAAGCTCTTGAACG |
| | | | | TGAAGGTGTTACCGATGTTTTTGCTTACCCTGGTGGAGCATCCATGG |
| | | | | AAATCCATCAAGCTCTTACTCGTTCTAATATCATTAGAAATGTTCTTC |
| | | | | CTCGACATGAACAAGGTGGGGTTTTCGCTGCTGAAGGCTACGCTCG |
| | | | | TGCTACTGGACGCGTTGGAGTTTGTATTGCCACTTCTGGTCCAGGTG |
| | | | | CTACTAATCTTGTTTCTGGTCTTGCTGATGCACTTCTTGACTCAGTCC |
| | | | | CGCTTGTCGCCATTACTGGGCAAGTTCCCCGGCGTATGATTGGTACT |
| | | | | GATGCTTTCCAAGAGACTCCAATTGTTGAGGTAACTCGATCCATTAC |
| | | | | TAAGCATAATTATTTGGTGTTAGATGTTGAGGATATTCCTAGAATTG |
| | | | | TTAAGGAAGCTTTCTTTTTAGCTAATTCTGGTAGACCTGGACCTGTT |
| | | | | TTGATTGATATTCCTAAAGATATTCAGCAACAATTAGTTGTTCCTAAT |
| | | | | TGGGAACAGTCCATTAAATTGGGTGGGTATCTTTCTAGGTTGCCTAA |
| | | | | ACCCACTTATTCTGCTAATGAAGAGGGACTTCTTGATCAAATTGTAA |
| | | | | GGTTAGTGGGTGAGTCTAAGAGACCTGTGCTGTATACTGGAGGTG |
| | | | | GGTGTTTGAATTCTAGTGAAGAATTGAGGAAATTTGTCGAATTGAC |
| | | | | AGGGATTCCGGTGGCTAGTACTTTAATGGGTTTGGGGGCTTTCCCT |
| | | | | TGTACTGATGATTTATCACTTCATATGTTGGGAATGCACGGGACTGT |
| | | | | GTATGCGAATTACGCGGTTGATAAGGCCGATTTGTTGCTTGCTTTCG |
| | | | | GGGTTAGGTTTGATGATCGAGTGACTGGTAAGCTCGAGGCGTTTGC |
| | | | | TAGCCGGGCTAAGATTGTGCACATCGATATCGATTCTGCTGAAATC |
| | | | | GGGAAGAATAAGCAACCTCATGTGTCGATTTGTGGTGATGTTAAAG |
| | | | | TGGCATTACAGGGGTTGAATAAGATTTTGGAATCTAGAAAAGGAAA |
| | | | | GGTGAAATTGGATTTCTCTAATTGGAGGGAGGAGTTGAATGAGCA |
| | | | | GAAAAAGAAGTTTCCTTTGAGTTTTAAGACTTTCGGGGATGCAATTC |
| | | | | CTCCGCAATACGCCATTCAGGTTCTTGACGAGTTGACAAAGGGTGA |
| | | | | TGCGGTTGTAAGTACCGGTGTTGGGCAGCACCAAATGTGGGCTGCC |
| | | | | CAATTCTATAAGTACCGAAATCCTCGTCAATGGCTGACCTCGGGTG |
| | | | | GTTTGGGGGCTATGGGGTTTGGTCTACCAGCTGCTATTGGAGCTGC |
| | | | | TGTTGCTCGACCAGATGCGGTGGTTGTAGACATTGATGGGGATGG |
| | | | | GAGTTTTATCATGAATGTTCAAGAGTTGGCTACGATTAGGGTGGAG |
| | | | | AATCTCCCGGTTAAAATCATGCTCTTGAACAATCAACATTTAGGTAT |
| | | | | GGTTGTTCAATGGGAAGATCGATTTTACAAAGCTAACCGGGCACAT |
| | | | | ACATACCTCGGGAATCCTTCCAATTCTTCCGAAATCTTCCCGGATAT |
| | | | | GCTCAAATTTGCTGAAGCATGTGATATACCAGCAGCCCGTGTTACCA |
| | | | | AGGTGAGCGATTTAAGGGCTGCAATTCAAACAATGTTGGATACTCC |
| | | | | AGGACCGTATCTGCTGGATGTAATCGTACCACATCAGGAGCATGTG |
| | | | | CTGCCTATGATCCCTAGCGGCGCCGCCTTCAAGGACACCATCACTGA |
| | | | | GGGTGATGGAAGAAGGGCTTATTAGTTGGTTGGAGATCTTTATAGA |
| | | | | GGAGAAGCTTTTTTGTATGTATGTTAGTATTTCCATAAACTTCTATAT |
| | | | | TCTCTGGCCGGCCTCTCGTTTAGCTGTTTTTATGTTAGTTTGTTGTTT |
| | | | | TCATGTTGCTTGCTACTTTGAAAAACCCTTTTGTGTTTTAGACCCATT |
| | | | | AGCATGAATAATCATCCTATATTATTGTATGGTTTGATACACGCTAG |
| | | | | TTGTTTCTTTTTATCATCGAGATAAAGACAACTACTAATCGGTGTAA |
| | | | | CCATGTTTGTCTCACATTGCTCGACGTTTTGTTCTCCTTTGATGAATT |
| | | | | TGATATTAGGAAGTTTGTTTGATACTAGTGAATCCTCATGTCCTATC |
| | | | | CTGTTTTCTCGTCTTAGCGAACATTGGTATTGTATCTCTTGGTGGGT |
| | | | | ATAGGAGTATTCGATTCGTTGTTATGTTCGACTCCTTCAGTGCTTTTG |
| | | | | GTGGGTTTTTCAAAGAAGGAAAAGGAAGCAGAAATGGCCTTAGAA |
| | | | | TGTAAAGTGGTCTTTTTCTGTAAGTGGGTATTGCCTTTCATCAGCCA |
| | | | | TGTTTTTATCTTTATATTTTGTGGTCTTTGAGGCTTTATGTTTAGTGTT |
| | | | | TGGTGTCTTTTCGTCGTATTCTGTGATCAGTTCTGAAATGTGGATCG |
| | | | | TAAAGACATAGATGATGAGGAAGAGGGTCGGGATGAGAGCAGCG |
| | | | | TTTTACTCGAAAAGCGATCCTAGTAAGGACCGAACCGAGTCAACAT |
| | | | | TTCGAGATGATATGTGTTCGAGTTTGACATGAAAATCTATCTGCCTG |
| | | | | CTCAGTGCTCACAATGGTAAATTGTACTGTAAATGATTGTTATGTCA |
| | | | | TGTTGGTTTTTCATCTGGAAATGTGTATCTGTAATGGTTCTTGTCAGT |
| | | | | TGATTGTATCGGTGTTCATTCGGGTTGATTTTGGGTTAGGTTTTCAA |
| | | | | GACTGTTTGAAATCAATTTATGTCATTGTGTCTATATTGTTTGTTACA |
| | | | | TAACTGCAAATCATTTTTGAAGTCGTATCAAATCGGATTCAATTATA |
| | | | | AGGTTGGGTGAATTTTGAGTCATTGGGTCTGAATTAAACACCTATCC |
| | | | | CAAGGATTATACATTTGTTGCAATTTTGCTCTTTTCATTCTTAAATTT |
| | | | | GGCTTCATCACGGTGTTTTGTTTTATAAGATTCTATTCGAATCTAAAG |
| | | | | CCGAACACACTTGATCATTAACATATGACTAATTTAACATAATTGGC |
| | | | | CGGCTAATTAGCCATATAAATTCAAGGTTGCTTAAAATTGTTGAAGA |
| | | | | ATAGCCCTAAAGACGTATAATCACTTTTAATATTTTTTAATTTTTTAA |
| | | | | CGTGATTTGATTTGATATCTTTTAATATACTATTAGGCTCATTGTATG |
| | | | | CTACAAATTTGAGGGGAAAACTATGAACAACAATTCATATTAATAT |
| | | | | GTTTTTTAACAAACAAGAAAAATAGAAAGTTAAAAGACAATGATTC |
| | | | | ATCAAATAAATCATGTGTACTTTTTATTCGTTTGTAGTTGCATATGAC |
| | | | | GTTACAACCATCGAAAACAATCATTTTATTAGTTTTATCATTGATTGT |
| | | | | TTTTGATGGTTGTAACGTCATATGCAACCATAAACGTATAAAAAGTG |
| | | | | ACTCAATTTCTAGAGGCTAAAACAATTGGGTTGCCTAACAAGTGTTG |
| | | | | ATTTAATATTAGGTTGTTTGTGCTTACTTAATAAATCTCTACACTAGT |
| | | | | CTTAAAATTGTAATCTAAATTGTGCTACAAAAATAGGTAATTAATTA |
| | | | | GAAAAGTCGATTAAATCAATCTTTTAGGGTATATTAGCAATTATTAC |
| | | | | TAATGATTATAAGTAACCGAGAGGTCTTGTCATTTAGGATTAATTGA |
| | | | | TATTAGGTCTTTTGAGAGCCGTCTTTACAAAATACGGTCTCAAGTAA |
| | | | | GAATTTATGAATTTTTTTTATTCTTACATGACTCATGGAAAGATTCCT |
| | | | | AGTTGTTCCAAAGCCCAATCATCTATTCACAATTTATTTAAATTCGAC |
| | | | | CCAAACTAATTTATTCAACTCAACCTAAAATGATTCTTGTTC |
| 8 | Amaranthus | gDNA | 5410 | TGATCATGAAATTAGTTTGAGGAATCGTTTTTTCGAGTACTGAAGAC |
| | palmeri | Contig | | TAGAAAGGAACTTGAGACATCAGTTTGGGAATTCGATGGAGTAGC |
| | | | | GGATCGTTCTTCACTTTTTGCTCGGGAGGTATCAATGGCGTAAATTT |
| | | | | TTTTTGGAGACTGACTCAAATGGGATTCTTTGTGTAGTGTACAGCTT |
| | | | | CACTTACCACAGGAACACAGGTGTTTTTTGCTATATAGGTACAGAAA |
| | | | | CTCGGAAAAGTCCACATTTACTCTATAACTTCATTTACGGTCTAAAA |
| | | | | GTAGTTGAGAAGGTAAAATTTAGGATGCAATTTTTTGAAAGCTTTCT |
| | | | | ATGATAGCAAATTCTTACTTTTTATTTCTACTGGTAATTGTCATTTTG |
| | | | | TCAATGTCCTTTGCAAAGACTAATTTTACAGACTTGTTATTTTCGTTT |
| | | | | AAAATGTTTCGTATGATACCGAACCAGAAAGAGAAACAAGAAATTC |
| | | | | GGGCGAATTTTTCTCGTCATATGTTAGATCGAAACCATATGATCAGC |
| | | | | TTGATCTTGGTTGTACTGGTGTATTGATTTTCATGGTAAATGTCAAT |
| | | | | ATTTTCATGGTAAACAACTTGGGTGCCAATTTTGTTAGGGTTAGATT |
| | | | | TGGTGCTGCTTTTGAATCAGAGATGAAATCAGCCGAGAAATGAAGA |
| | | | | TAAATTGGGGTGATTTTGCAAAATAGTTTGTCTGTTAATTTTAACTTA |
| | | | | TATTTGTTACATTCTTTGTTACTTGCACCATTGTTGACTTTGGTACTAT |
| | | | | TCATCAAGCAAATCGACTTTCATATTGTCGGTAATCTATAAAATAAA |
| | | | | ATATAGTTTTCTGAGATCTTGTTGAATCGTCTCGATTCAACGGTTATT |
| | | | | AATTTTTAGTTTTCATAATTTTTTGATATGTATAATAAAAGATATTAA |
| | | | | CAATTGATATCCTGTATTTGGGGTACGAAAAAGCAAATAGTGCAAG |
| | | | | TAAAAAAGAACGGAGGAAGTACATGTACAATTATCACTCAACTATT |
| | | | | AGATAAATTAGTTGGTTGAGATAAATCGTTAGAACTTAGAAATCAC |
| | | | | CAAATCTATAATAAGCTTTTCGCATTAGCGTGTTTGATATCAGCTGC |
| | | | | TTAGTTGATGAAATTAGATGGTTAAATCACTCGCTTGAAGCTATCAC |
| | | | | TTATCAACCGTTTGTCAAAGATCCTTGCATTTTAATTCATTGTGACTT |
| | | | | GTGAGATAGATCTATATGAAGAATTTAAATTTTAACAATAAGCGTTT |
| | | | | TAATATTTAAAGCTGGTGTTTTGATAAATTTAATTAAACTATTTAGAT |
| | | | | AAGTTCGGACTGTCTCTTCATGAGAGATGAGACTGTATCAATCAGCT |
| | | | | AATTTATAATCACCTAAATATCTCCTTATCATCATAATACATCCACCT |
| | | | | CATAAAATCTATAACCAGAATCTAAAAGAGGGATGGAAGACGACA |
| | | | | AGTCAACCCCTCACCTAATCATGTCTTTGATGTTAATAGCATAAAAG |
| | | | | CACATGAGTGATGAGAACAAACACATCAACCCTAATCTTATCCAAG |
| | | | | AAAATACCCCATTAGGCATTAAGGTCCTTTTCTTTTGTTTTCTTTTGC |
| | | | | CCTAAAAAGCAAAAGTGGAAAGAAACCCAAAAAAATCAATTTCACG |
| | | | | TTGCAAATTGTCAAATTTTTTTATAAAAAAAAATGAAAAATCTTTATA |
| | | | | CCACAAAAACAAAAAGCAACAATGAAAATTTAGAATCATACTCCCG |
| | | | | TTTCAATTTACTTGCAACAGTTACGCAGTTTAATACACTAATTCAATC |
| | | | | CTTAATATCTATAATTATAAATAATAAAAAATTATAAAAATTTAATAT |
| | | | | TAATAATCTTTGCAATGAGATGAATCAAACAAGATTTCACTAATAAA |
| | | | | TAATGTCATTTTTTTATATGTTGCAACTGATATGGAACAGAGAAAGT |
| | | | | ATCAATCTTGATATTCAAGGGTATTTAAGTAATTACAGAACAACCAT |
| | | | | TGTTATTTGTTAAGCGCCTCCACTCATTTCTTCTTCCTTCTCAGTTATT |
| | | | | CCATTTCTCCATTTTCGCTTAGCTTTCCTCTCACACAAATTACCTCCAT |
| | | | | TTCCAACCTTTCAAGCTTTCAACAATGGCGTCCACTTCAACAAACCC |
| | | | | ACCATTTTCCTCTTTTACTAAACCTAACAAAATCCCTAATCTGCAATC |
| | | | | ATCCATTTACGCTATCCCTTTTTCCAATTCTCTTAAACCCACTTCTTCT |
| | | | | TCTTCAATCCTCCGCCGCCCTCTTCAAATCTCATCATCTTCTTCTCAAT |
| | | | | CACCTAAACCTAAACCTCCTTCCGCTACTATAACTCAATCACCTTCAT |
| | | | | CTCTCACCGATGATAAACCCTCTTCTTTTGTTTCCCGATTTAGCCCTG |
| | | | | AAGAACCCAGAAAAGGTTGCGATGTTCTCGTTGAAGCTCTTGAACG |
| | | | | TGAAGGTGTTACCGATGTTTTTGCTTACCCTGGTGGAGCATCCATGG |
| | | | | AAATCCATCAAGCTCTTACTCGTTCTAATATCATTAGAAATGTTCTTC |
| | | | | CTCGACATGAACAAGGTGGGGTTTTCGCTGCTGAAGGCTACGCTCG |
| | | | | TGCTACTGGACGCGTTGGAGTTTGTATTGCCACTTCTGGTCCGGGT |
| | | | | GCTACTAATCTTGTCTCTGGTCTTGCTGATGCGCTTCTTGACTCAGTC |
| | | | | CCGCTCGTCGCCATTACTGGGCAAGTTCCCCGGCGTATGATTGGTAC |
| | | | | TGATGCTTTTCAAGAGACTCCAATTGTTGAGGTAACTCGATCCATTA |
| | | | | CTAAGCATAATTATTTGGTGTTAGATGTTGAGGATATTCCTAGAATT |
| | | | | GTTAAGGAAGCTTTCTTTTTAGCTAATTCTGGTAGACCTGGACCTGT |
| | | | | TTTGATTGATATTCCTAAAGATATTCAGCAACAATTAGTTGTTCCTAA |
| | | | | TTGGGAACAGCCCATTAAATTGGGTGGGTATCTTTCTAGGTTGCCTA |
| | | | | AACCCACTTATTCTGCTAATGAAGAGGGACTTCTTGATCAAATTGTA |
| | | | | AGGTTAGTGGGTGAGTCTAAGAGACCTGTGCTGTATACTGGAGGT |
| | | | | GGGTGTTTGAATTCTAGTGAAGAATTGAGGAAATTTGTCGAATTGA |
| | | | | CAGGGATTCCGGTGGCTAGTACTTTAATGGGTTTGGGGGCTTTCCC |
| | | | | TTGTACTGATGATTTATCACTTCATATGTTGGGAATGCACGGGACTG |
| | | | | TGTATGCGAATTACGCGGTTGATAAGGCCGATTTGTTGCTTGCTTTC |
| | | | | GGGGTTAGGTTTGATGATCGAGTGACTGGTAAGCTCGAGGCGTTT |
| | | | | GCTAGCCGGGCTAAGATTGTGCACATCGATATCGATTCTGCTGAAA |
| | | | | TCGGGAAGAATAAGCAACCTCATGTGTCGATTTGTGGTGATGTTAA |
| | | | | AGTGGCATTACAGGGGTTGAATAAGATTTTGGAATCTAGAAAAGG |
| | | | | AAAGGTGAAATTGGATTTCTCTAATTGGAGGGAGGAGTTGAATGA |
| | | | | GCAGAAAAAGAAGTTTCCTTTGAGTTTTAAGACTTTCGGGGATGCA |
| | | | | ATTCCTCCGCAATACGCCATTCAGGTTCTTGACGAGTTGACAAAGG |
| | | | | GTGATGCGGTTGTAAGTACCGGTGTTGGGCAGCACCAAATGTGGG |
| | | | | CTGCCCAATTCTATAAGTACCGAAATCCTCGCCAATGGCTGACCTCG |
| | | | | GGTGGTTTGGGGGCTATGGGGTTTGGTCTACCAGCTGCTATTGGAG |
| | | | | CTGCTGTTGCTCGACCAGATGCGGTGGTTGTAGACATTGATGGGGA |
| | | | | TGGGAGTTTTATCATGAATGTTCAAGAGTTGGCTACGATTAGGGTG |
| | | | | GAGAATCTCCCGGTTAAAATCATGCTCTTGAACAATCAACATTTAGG |
| | | | | TATGGTTGTTCAATGGGAAGATCGATTTTACAAAGCTAACCGGGCA |
| | | | | CATACATACCTCGGGAATCCTTCCAATTCTTCCGAAATCTTCCCGGAT |
| | | | | ATGCTCAAATTCGCTGAAGCATGTGATATACCAGCAGCTCGTGTTAC |
| | | | | CAAGGTGAGCGATTTAAGGGCTGCAATTCAAACAATGTTGGATACT |
| | | | | CCAGGACCGTATCTGCTGGATGTAATCGTACCACATCAGGAGCATG |
| | | | | TGCTGCCTATGATCCCTAGCGGTGCCGCCTTCAAGGACACCATCACA |
| | | | | GAGGGTGATGGAAGAAGGGCTTATTAGTTGGTTGGAGATCTTTATA |
| | | | | GAGGAGAAGCTTTTTTGTATGTATGTTAGTATTTCCATAAACTTCTAT |
| | | | | ATTCTCTGGCCGGCCTCTCGTTTAGCTGTTTTTATGTTAGTTTGTTGT |
| | | | | TTTCATGTTAGTTTGTTGTTTTCATGTTGCTTGCTACTTTGAAAAACC |
| | | | | CTTTTGTGTTTTAGACCCATTAGCATGAATAATCATCCTATATTATTG |
| | | | | TATGGTTCGATACACGCTAGTTGTTTCTTTTTATTATCGAGTTAAAGA |
| | | | | CAACTACTAATCGGTGTAACCAAGTTTGTCTCACATTGCTCGACGTT |
| | | | | TTGTTCTCCTTTGATGAATTTGATATTAGGAAGTTTGTTTGATACTAG |
| | | | | TGAATCCTCATGTCCTATCCTGTTTTCTCGTCTTAGCGAACATTGGTA |
| | | | | TTGTATCTCTTGGTGGGTATAGGAGTATTCGATTCGTTGTTATGTTC |
| | | | | GACTCCTTCAGTGCTTTTGGTGGGTTTTTCAAAGAAGGAAAAGGAA |
| | | | | GCAGAAATGGCCTTAGAATGTAAAGTGGTCTTTTTCTGTAAGTGGG |
| | | | | TATTGCCTTTCATCAGCCATGTTTTTATCTTTATATTTTGTGGTCTTTG |
| | | | | AGGCTTTATGTTTAGTGTTTGGTGTCTTTTCGTCGTATTCTGTGATCA |
| | | | | GTTCTGAAATGTGGATCGTAAAGACATAGATGATGAGGAAGAGGG |
| | | | | TCGGGATGAGAGCAGCGTTTTACTCGAAAAGCGATCCTAGTAAGGA |
| | | | | CCGAACCGAGTCAACATTTCGAGATGATATGTGTTCGAGTTTGACAT |
| | | | | GAAAATCTATCTGCCTGCTCAGTGCTCACAATGGTAAATTGTACTGT |
| | | | | AAATGATTGTTATGTCATGTTGGTTTTTCATCTGGAAATGTGTATCT |
| | | | | GTAATGGTTCTTGTCAGTTGATTGTATCGGTGTTCATTCGGGTTGAT |
| | | | | TTTGGGTTAGGTTTTCAAGACTGTTTGAAATCAATTTATGTCATTGT |
| | | | | GTCTATATTGTTTGTTACATAACTGCAAATCATTTTTGAAGTCGTATC |
| | | | | AAATCGGATTCAATTATAAGGTTGGGTGAATTTTGAGTCATTGGGT |
| | | | | CTGAATTAAACACCTATCCCAAGGATTATACATTTGTTGCAATTTTGC |
| | | | | TCTTTTCATTCTTAAATTTGGCTTCATCACGGTGTTTTGTTTTATAAG |
| | | | | ATTCTATTCGAATCTAAAGCCGAACACACTTGATCATTAACATATGA |
| | | | | CTAATTTAACATAATTCTCCGGCTAATTAGCCATATAAATTCAAGGTT |
| | | | | GCTTAAAATTGTTGAAGAATAGCCCTAAAGACGTATAATCACTTTTA |
| | | | | ATATTTTTTAATTTTTTAACGTGATTTGATTTGATATCTTTTAATATAC |
| | | | | TATT |
| 9 | Amaranthus | cDNA | 3817 | AACAGGGAAGGCCATTATGTTTCAATCACCAAAATTGGCCCAAATC |
| | rudis | Contig | | TGAAAGAGCATAGGACACGATGGTAGTAAAACCAGGTTTATAATCA |
| | | | | GTCAAGAAATCTAAAACTTCCAACAATCATACACAAAACCAATGGA |
| | | | | ATCAATATTGCAGCCAATTGCAGAGCGATATGCACAATCATCTTCAA |
| | | | | AAAAGAAGCTACCCGGCCCTGAACACCACTGCAAACTGTCCTTCACT |
| | | | | GCACAATCATCTTCGATGCACATTCCAACCTCATCCGCCATTCTTCAC |
| | | | | ATTCATAGTTACCCGACCAGCCTCTAGTTAAAATCCTGATGAGTAAT |
| | | | | ACTGTCAAACCAAATCCACGTGAAAAAGATGAAAGACCACAATTGA |
| | | | | TTTGTGGTAAAATAAATAATTGGGCCCTGTTCTTTATCTTGCAAATA |
| | | | | CAACCTTGTCTTCTGAAAAAGTAGGCACAAACTCCCTAGAGTTCGG |
| | | | | AAGAGGAACTTCCTTGAACCAAGGATGATCAAGAGCCTCTTCTGCG |
| | | | | GTTATCCTCTTCTCAGGGTCATAGGTTAATAGACGGCTCAACAAATC |
| | | | | AAGCCCCGTGTCAGAAAGTGCAGGAGCACCTGTAAAAGATGTGCG |
| | | | | AGGAAACTTCTTATGCAATTGATTGTACGGTTGGCGAATAAAGTTG |
| | | | | AACTTGTGCCCAGGCAATTGAGAAAATCCTGGCCAAAGTTTGTCATT |
| | | | | AGGTGTGCCCAATGTTGCAAACATCTTGTTAAGCTGCTCAATCTCAG |
| | | | | ATTTCCCATCAAATAAGGGTTTATTGGCCAATAGTTCAGCCATGATG |
| | | | | CAACCCACAGACCACATATCCACAGCAGTTGAGTACTCTGTAGCTCC |
| | | | | AAGAAGAAGTTCAGGAGCCCTGTACCAAAGAGTAACCACCAAAGC |
| | | | | AGTATAAGGCTTCAACGGGCTACCATACTGACGTGCCATACCGAAG |
| | | | | TCGCATATCTTTAGCTCTCCCTTGTTATTTACCAAAAGATTTGAAGTC |
| | | | | TTCAAATCTCTATGTAGCACCCAATTATGATGAAGATACTTCACACC |
| | | | | CTCCAAAAGTTGAAGCATTAAACACTTAACTTCACTATATCTGAAAG |
| | | | | GCTGCTTCCTAGTCTGCATTAAAGCCTTAAGATCATGCTCTACATGA |
| | | | | TCCATCACCATGTAAATGCTATCAAAGCCATCCGGGCTATCATCAAC |
| | | | | CACTACTTCTCGAACATTCACAATTGAAGGATGATTCAAGGACACAA |
| | | | | GAGTATTGATTTCCCTCAAGTAATAAACAGGAAACCCCTCTCTTTGG |
| | | | | TCACCCAACTTCATCTTCTTTAAGGCAACAATCTCACCACTTTCTTCA |
| | | | | TCTCTTGCTTTGTACACAATACCATAACTTCCTTCACTAATTTTATTAA |
| | | | | GCTTCTTATACTTGAACACACTTCTGCATCCCTGAAGCATATTTCTAT |
| | | | | TTCCTCTCCCGGAAACCCCGGGCTCTCCACCGTCATCACTCGCAGCA |
| | | | | CAATCCTCACCATCACTCGCATCAACCTCCATACAGTCATCTCTCTTC |
| | | | | AAACCCACCATTTTCTATTTTACTATACCTTACAAAATCCCTAATCTG |
| | | | | CAATCATCCATTTACGCTATCCCTTTTTCCGATTCTCTTAAACCCACTT |
| | | | | CTTCTTCTTCAATCCTCCGCCGCCCTCTTCAAATCTCATCATCTTCTTC |
| | | | | TCAATCACCTAAACCTAAACCTCCTTCCGCTACTATAACTCAATCACC |
| | | | | TTCGTCTCTCACCTATGATAAACCCTCTTCTTTTGTTTCCCGATTTAGC |
| | | | | CCTGAAGAACCCAGAAAAGGTTGCGATGTTCTCGTTGAAGCTCTTG |
| | | | | AACGTGAAGGTGTTACCGATGTTTTTGCTTACCCTGGTGGAGCATCC |
| | | | | ATGGAAATTCATCAAGCTCTTACTCGTTCTAATATCATTAGAAATGTT |
| | | | | CTTCCTCGACATGAACAAGGTGGGGTTTTCGCTGCTGAAGGCTACG |
| | | | | CTCGTGCTACTGGACGTGTTGGAGTTTGTATTGCCACTTCTGGTCCG |
| | | | | GGTGCTACTAATCTTGTTTCCGGTTTTGCTGATGCACTTCTTGACTCA |
| | | | | GTCCCGCTTGTCGCCATTACTGGGCAAGTTCCTCGGCGTATGATTGG |
| | | | | TACTGATGCTTTTCAAGAGACTCCTATTGTTGAGGTAACTCGATCAA |
| | | | | TTACTAAGCATAATTATTTGGTGTTAGATGTTGAGGATATCCCTAGA |
| | | | | ATTGTTAAGGAAGCTTTCTTTTTAGCTAATTCTGGTAGACCTGGACC |
| | | | | TGTTTTGATTGATATTCCTAAAGATATTCAGCAACAATTGGTTGTTCC |
| | | | | TAACTGGGAACAGCCCATTAAATTGGGTGGGTATCTTTCTAGGTTG |
| | | | | CCTAAACCCACTTTTTCTGCTAATGAAGAGGGACTTCTTGATCAAAT |
| | | | | TGTGAGGTTGGTGGGTGAGTCTAAGAGACCTGTGCTGTATACTGGA |
| | | | | GGTGGGTGTTTGAATTCTAGTGAAGAATTAAGGAAATTTGTCGAGT |
| | | | | TGACAGGGATTCCGGTTGCTAGTACTTTAATGGGGTTGGGGGCTTT |
| | | | | CCCTTGTACTGATGATTTATCACTTCAAATGTTGGGAATGCACGGGA |
| | | | | CTGTGTACGCGAATTACGCGGTGGATAAGGCTGATTTGTTGCTTGC |
| | | | | TTTCGGGGTTAGGTTTGATGATCGAGTGACTGGGAAGCTCGAGGC |
| | | | | GTTTGCTAGCCGGGCTAAGATTGTGCACATCGATATCGATTCTGCTG |
| | | | | AAATCGGGAAGAATAAGCAACCTCATGTGTCGATTTGTGGTGATAT |
| | | | | TAAAGTGGCATTACGGGGTTGAATAATATTTTGGAATCTAGAAAAG |
| | | | | GAAAGGTGAAATTGGATTTCTCTAATTGGAGGGAGGAATTGAATG |
| | | | | AGCAGAAAAAGAAGTTTCCTTTGAGTTTTAAGACTTTCGGGGATGC |
| | | | | AATTCCTCCGCAATATGCCATTCAGGTTCTGGACGAGTTGACGAAG |
| | | | | GGTGATGCGATTGTAAGTACCGGTGTTGGGCAGCACCAAATGTGG |
| | | | | GCTGCCCAATTCTATAAGTACCGAAATCCTCGCCAATGGCTGACCTC |
| | | | | GGGTGGTTTGGGGGCTATGGGGTTTGGTCTACCAGCCGCTATTGGA |
| | | | | GCTGCTGTTGCTCGACCAGATGCGGTGGTTGTAGACATTGATGGGG |
| | | | | ACGGGAGTTTTATCATGAATGTTCAAGAGTTGGCTACGATTAGGGT |
| | | | | GGAGAATCTCCCGGTTAAAATCATGCTCTTGAACAATCAACATTTAG |
| | | | | GTATGGTTGTTCAATTGGAAGATCGATTTTACAAAGCTAACCGGGC |
| | | | | ACATACATACCTCGGAAATCCATCCAATTCTTCCGAAATCTTCCCGG |
| | | | | ATATGCTCAAATTTGCTGAAGCATGTGATATACCAGCAGCCCGTGTT |
| | | | | ACCAAGGTGAGCGATTTAAGGGCTGCAATTCAAACAATGTTGGATA |
| | | | | CTCCAGGACCATATCTGCTGGATGTAATCGTACCACATCAGGAGCA |
| | | | | TGTGCTGCCTATGATCCCTAGCGGTGCCGCCTTCAAGGACACCATCA |
| | | | | CAGAGGGTGATGGAAGAAGGGCTTATTAGTTGGTTGGAGATCTTTA |
| | | | | TTTGGAGAAGCTTTTTTGTATGTATGTTAGTAGTTCCATAAACTTCTA |
| | | | | TATTCTCTGGCCGTTCTCTCGTTTAGCTGTTTTTATGTTAGTTTGTTGT |
| | | | | TTTCATGTTGCTTGTTACTTTGAAAAACCCTTTTGTGTTTAAGACCCA |
| | | | | TTAGCATGAATAATCTTCCTATACTATTGTATGGTTCGATACACGCTA |
| | | | | GTTGTTTCTTTTTATTAACGAGTTAAAGACAACTATTAGTCGGTGTA |
| | | | | AAAAAAAAGAAAAAAAAACAAAACATGTCGGCCGCCTCGGTCTCTA |
| | | | | CTGAGACACGCAACAGGGGATAGG |
| 10 | Amaranthus | cDNA | 2404 | CTTTCTCCATTTTCGCTTAGCTCTCCTCTCACACAAATTACCTCCATTT |
| | rudis | Contig | | CCAACCTTCCAAGCTTTCAACAATGGCGTCCACTTCTTCAAACCCACC |
| | | | | ATTTTCCTATTTTACTAAACCTTACAAAATCCCTAATCGTCAATCCTA |
| | | | | CATTTACGCTCTCCCTTTTTCCAATTCTCATAAACCCACTTCTTCTTCA |
| | | | | ATCCTCCGCCGCGCTCTTCAAATCTCGTCATCTTCTTCTCAATCACCT |
| | | | | AAACCTAAACCTCCTTCCGCTACTATAACTCAATCACCTTCATCTCTC |
| | | | | ACCGATGATAAACCCTCTTCTTTTGTTTCCCGATTTAGCCCTGAGGA |
| | | | | ACCCAGAAAAGGTTGCGATGTTCTCGTTGAAGCTCTTGAACGTGAA |
| | | | | GGTGTTACCGATGTTTTTGCTTACCCTGGTGGAGCTTCCATGGAAAT |
| | | | | CCATCAAGCTCTTACTCGTTCTAATATCATTAGAAATGTTCTTCCTCG |
| | | | | ACATGAACAAGGTGGGGTTTTCGCTGCTGAAGGCTACGCTCGTGCT |
| | | | | ACTGGACGTGTTGGAGTTTGTATTGCCACTTCTGGTCCGGGTGCTAC |
| | | | | TAATCTTGTTTCCGGTTTTGCTGATGCACTTCTTGACTCAGTCCCGCT |
| | | | | TGTCGCCATTACTGGGCAAGTTCCTCGGCGTATGATTGGTACTGAT |
| | | | | GCTTTTCAAGAGACTCCTATTGTTGAGGTAACTCGATCAATTACTAA |
| | | | | GCATAATTATTTGGTGTTAGATGTTGAGGATATCCCTAGAATTGTTA |
| | | | | AGGAAGCTTTCTTTTTAGCTAATTCTGGTAGACCTGGACCTGTTTTG |
| | | | | ATTGATATTCCTAAAGATATTCAGCAACAATTGGTTGTTCCTAACTG |
| | | | | GGAACAGCCCATTAAATTGGGTGGGTATCTTTCTAGGTTGCCTAAA |
| | | | | CCCACTTTTTCTGCTAATGAAGAGGGACTTCTTGATCAAATTGTGAG |
| | | | | GTTGGTGGGTGAGTCTAAGAGACCTGTGCTGTATACTGGAGGTGG |
| | | | | GTGTTTGAATTCTAGTGAAGAATTAAGGAAATTTGTCGAGTTGACA |
| | | | | GGGATTCCGGTTGCTAGTACTTTAATGGGGTTGGGGGCTTTCCCTT |
| | | | | GTACTGATGATTTATCACTTCAAATGTTGGGAATGCACGGGACTGT |
| | | | | GTACGCGAATTACGCGGTGGATAAGGCTGATTTGTTGCTTGCTTTC |
| | | | | GGGGTTAGGTTTGATGATCGAGTGACTGGGAAGCTCGAGGCGTTT |
| | | | | GCTAGCCGGGCTAAGATTGTGCACATCGATATCGATTCTGCTGAAA |
| | | | | TCGGGAAGAATAAGCAACCTCATGTGTCGATTTGTGGTGATATTAA |
| | | | | AGTGGCATTACGGGGTTGAATAATATTTTGGAATCTAGAAAAGGAA |
| | | | | AGGTGAAATTGGATTTCTCTAATTGGAGGGAGGAATTGAATGAGCA |
| | | | | GAAAAAGAAGTTTCCTTTGAGTTTTAAGACTTTCGGGGATGCAATTC |
| | | | | CTCCGCAATATGCCATTCAGGTTCTGGACGAGTTGACGAAGGGTGA |
| | | | | TGCGATTGTAAGTACCGGTGTTGGGCAGCACCAAATGTGGGCTGCC |
| | | | | CAATTCTATAAGTACCGAAATCCTCGCCAATGGCTGACCTCGGGTG |
| | | | | GTTTGGGGGCTATGGGGTTTGGTCTACCAGCCGCTATTGGAGCTGC |
| | | | | TGTTGCTCGACCAGATGCGGTGGTTGTAGACATTGATGGGGACGG |
| | | | | GAGTTTTATCATGAATGTTCAAGAGTTGGCTACGATTAGGGTGGAG |
| | | | | AATCTCCCGGTTAAAATCATGCTCTTGAACAATCAACATTTAGGTAT |
| | | | | GGTTGTTCAATTGGAAGATCGATTTTACAAAGCTAACCGGGCACAT |
| | | | | ACATACCTCGGAAATCCATCCAATTCTTCCGAAATCTTCCCGGATAT |
| | | | | GCTCAAATTTGCTGAAGCATGTGATATACCAGCAGCCCGTGTTACCA |
| | | | | AGGTGAGCGATTTAAGGGCTGCAATTCAAACAATGTTGGATACTCC |
| | | | | AGGACCATATCTGCTGGATGTAATCGTACCACATCAGGAGCATGTG |
| | | | | CTGCCTATGATCCCTAGCGGTGCCGCCTTCAAGGACACCATCACAG |
| | | | | AGGGTGATGGAAGAAGGGCTTATTAGTTGGTTGGAGATCTTTATTT |
| | | | | GGAGAAGCTTTTTTGTATGTATGTTAGTAGTTCCATAAACTTCTATAT |
| | | | | TCTCTGGCCGTTCTCTCGTTTAGCTGTTTTTATGTTAGTTTGTTGTTTT |
| | | | | CATGTTGCTTGTTACTTTGAAAAACCCTTTTGTGTTTAAGACCCATTA |
| | | | | GCATGAATAATCTTCCTATACTATTGTATGGTTCGATACACGCTAGT |
| | | | | TGTTTCTTTTTATTAACGAGTTAAAGACAACTATTAGTCGGTGTAAA |
| | | | | AAAAAAGAAAAAAAAACAAAACATGTCGGCCGCCTCGGTCTCTACT |
| | | | | GAGACACGCAACAGGGGATAGG |
| 11 | Amaranthus | cDNA | 1364 | TCTTCCTTCTTGGTGATTCCCTTTCTCCATTTTCGCTTAGCTCTCCTCT |
| | rudis | Contig | | CACACAAATTACCTCCATTTCCAACCTTCCAAGCTTTCAACAATGGC |
| | | | | GTCCACTTCTTCAAACCCACCATTTTCTATTTTACTAAACCTTACAAA |
| | | | | ATCCCTAATCGTCAATCCTACATTTACGCTCTCCCTTTTTCCAATTCTC |
| | | | | ATAAACCCACTTCTTCTTCAATCCTCCGCCGCGCTCTTCAAATCTCAT |
| | | | | CATCTTCTTCTCAATCACCTAAACCTAAACCTCCTTCCGCTACTATAA |
| | | | | CTCAATCACCTTCATCTCTCACCGATGATAAACCCTCTTCTTTTGTTTC |
| | | | | CAGATTTAGCCCTGAGAACCCAGAAAAGGTTGCGATGTTCTCGTTG |
| | | | | AAGCTCTTGAACGTGAAGGTGTTACCGATGTTTTTGCTTACCCTGGT |
| | | | | GGAGCTTCCATGGAAATCCATCAAGCTCTTACTCGTTCTAATATCAT |
| | | | | TAGAAATGTTCTTCCTCGACATGAACAAGGTGGGGTTTTCGCTGCTG |
| | | | | AAGGCTACGCTCGTGCTACTGGACGTGTTGGAGTTTGTATTGCCAC |
| | | | | TTCTGGTCCGGGTGCTACTAATCTTGTTTCCGGTTTTGCTGATGCACT |
| | | | | TCTTGACTCAGTCCCGCTTGTCGCCATTACTGGGCAAGTTCCTCGGC |
| | | | | GTATGATTGGTACTGATGCTTTTCAAGAGACTCCTATTGTTGAGGTA |
| | | | | ACTCGATCAATTACTAAGCATAATTATTTGGTGTTAGATGTTGAGGA |
| | | | | TATCCCTAGAATTGTTAAGGAAGCTTTCTTTTTAGCTAATTCTGGTAG |
| | | | | ACCTGGACCTGTTTTGATTGATATTCCTAAAGATATTCAGCAACAAT |
| | | | | TGGTTGTTCCTAACTGGGAACAGCCCATTAAATTGGGTGGGTATCTT |
| | | | | TCTAGGTTGCCTAAACCCACTTTTTCTGCTAATGAAGAGGGACTTCT |
| | | | | TGATCAAATTGTGAGGTTGGTGGGTGAGTCTAAGAGACCTGTGCTG |
| | | | | TATACTGGAGGTGGGTGTTTGAATTCTAGTGAAGAATTAAGGAAAT |
| | | | | TTGTCGAGTTGACAGGGATTCCGGTTGCTAGTACTTTAATGGGGTT |
| | | | | GGGGGCTTTCCCTTGTACTGATGATTTATCACTTCAAATGTTGGGAA |
| | | | | TGCACGGGACTGTGTACGCGAATTACGCGGTGGATAAGGCTGATTT |
| | | | | GTTGCTTGCTTTCGGGGTTAGGTTTGATGATCGAGTGACTGGGAAG |
| | | | | CTCGAGGCGTTTGCTAGCCGGGCTAAGATTGTGCACATCGATATCG |
| | | | | ATTCTGCTGAAATCGGGAAGAATAAGCAACCTCATGTGTCGATTTG |
| | | | | TGGTGATATTAAAGTGGCATTACGGGGGTTGAATAATATTTTGGAA |
| 12 | Amaranthus | gDNA | 2528 | TATAAGTACCGAAATCCTCGCCAATGGCTGACCTCGGGTGGTTTGG |
| | rudis | Contig | | GGGCTATGGGGTTTGGTCTACCAGCCGCTATTGGAGCTGCTGTTGC |
| | | | | TCGACCAGATGCGGTGGTTGTAGACATTGATGGGGACGGGAGTTTT |
| | | | | ATCATGAATGTTCAAGAGTTGGCTACGATTAGGGTGGAGAATCTCC |
| | | | | CGGTTAAAATCATGCTCTTGAACAATCAACATTTAGGTATGGTTGTT |
| | | | | CAATGGGAAGATCGATTTTACAAAGCTAACCGGGCACATACATACC |
| | | | | TCGGGAATCCTTCCAAATCTTCAGAAATCTTCCCGGATATGCTGAAA |
| | | | | TTTGCTGAAGCATGTGATATACCAGCAGCCCGTGTTACCAAGGTGA |
| | | | | GCGATTTAAGGGCTGCAATTCAAACAATGTTGGATACTCCAGGACC |
| | | | | ATATCTGCTGGATGTAATCGTACCACATCAGGAGCATGTGCTGCCTA |
| | | | | TGATCCCTAGCGGTGCCGCCTTCAAGGACACCATCACAGAGGGTGA |
| | | | | TGGAAGAAGGGCTTATTAGTTGGTTGGAGATCTTTATAGAGGAGAA |
| | | | | GCTTTTTTGTATGTATGTTAGTAGTTCCATAAACTTCTATATTCTCTG |
| | | | | GCCGTTCTCTCGTTTAGCTGTTTTTATGTTAGTTTGTTGTTTTCATGTT |
| | | | | GCTTGCTACTTTGAAAAACCCTTTTGTGTTTTAGACCCATTAGTATGA |
| | | | | ATAATCTTCCTATATTATTGTATGGTTCGATACACGCTAGTTGTTTCT |
| | | | | TTTTATTAACGAGTTAAGGACAACAATTAGTCGGTGTAACCAAGTTT |
| | | | | GTCTCACATTGCTCGACGTTTTGTTCTCCTTTGATGAATTTGAGGAG |
| | | | | TATTAGGGAGTTTGTTTGATACTAGTGAATCTTCATGTCCTATACTG |
| | | | | TTTTCTCGTCTTAGCGGACATTGGTATTGTATCTCTTGGTGGGTTTTT |
| | | | | TGTGGGTATAGGAGTATTCGATTCGTTGTTATGTTCGACTCCTTCAA |
| | | | | TGCTTTTGGTGGGTTTTTCAAAGAAGCAAAAGGAAGCAGAAATGGC |
| | | | | CTTAGAATGTAAACTGGTGGAATGGTTAGGTACCCTTCTTTTTTTGT |
| | | | | GGGTGGGTGTTGCCTTTTATCAGCCATGTTTTTATGTTCATATTTTGT |
| | | | | GGTCTTTGAGGCCTTATGTTTAGTGTTGGTGTCTTTTTCGTCGTATTC |
| | | | | TGTGTTCCGTTCTGAAATGTGGATCTCAAAGACATAGATGATGAGG |
| | | | | AAGAGGGTCGGGATAAGTGCAGTGTTTTACTCCAAAAGCGAGCCTA |
| | | | | GTAAGGACGGAAACGAGTCAACATTGCGAGATGATACGCGTTCGA |
| | | | | GTAAGACATGAAAATCTGTCTGCCTGCTCAGTGCTCACAATGGTAA |
| | | | | ATTGTACTGTAAATGATTGTTCTGTCATGTGGGTTTTTTCATCTGGA |
| | | | | AATGTGTATCTAAAATGGTTCTTGTCAGTTGATTGTATCATCAATTCA |
| | | | | CCGAGGATTACACCATTTGCTGCAATTTTGCTCATTCCATTTCTAAAT |
| | | | | TTGGCCTCGGGTATTTCGTTTATTAAGGCTCTATTTGATTCTAAAGCC |
| | | | | GATTCGCCTAGTAAATTTTGGGGGTTCGCTCAAAATTGTTGAAAAA |
| | | | | AGCCCAAACTCAATCATAACTCGCTTTTTTCGATTAGCGATCAGCGG |
| | | | | GGAGATTAGCAAATTATGACATTGTCTATGACCATCTTCATAATCAC |
| | | | | TTTCGGCCTTCATTAGTTGGTTCCCATCTGTCATTGTCTCTACACTAT |
| | | | | CCTTATATGATCTTCATCACCAATGCTACTACTAACTAAACCTAGTAG |
| | | | | CTTTCGCTAACTTGCCGTTCTTCAACAACAAACTTCCATCTTAATAAC |
| | | | | TCTCCGTTTCTCTTGAGATCTTCAACAACGAACTCTTTTAACCTCGTA |
| | | | | ACATTACAATGAGTTCCTTTGTTAAAATGTTTCAATAAATTCCAATGA |
| | | | | CTTCAATAAGCCCTAAAGACGTATAATCACTTCTAATATCTTTTAATT |
| | | | | TTTTAACGTGGTCTGATTTAATATCTTTTAATATACTATTTTTTTTAAT |
| | | | | CCCACTCTGATATCAATTGTTGTGAAATTAGGCTCATTGTATGCTAC |
| | | | | AAATTTGAGGGGAAAACTATGAACAATAATTCTTTAACAAACAAGA |
| | | | | AAAATAGAAAGTTAAAAGATAATTACTCATCAAGTAAATCATGTGT |
| | | | | ACTTTTTATTCGTTTCTTGTTGCATATGATGTTTGATTCCAAGAAACA |
| | | | | ATCGAAAACAATCATTTTATTAGTTGTATCATTGATAAGAGTAAGAT |
| | | | | TGCGTACCCTAAATGAGAGTCGCTTATTAAGATTGGGGTAATGCAA |
| | | | | ATGCGGGTCCCTTTGGGTTAGGAAATTAGATGAAAGTTCCTTAGCG |
| | | | | TAAATCTTTATGGTTGGATTGATAGTAGGGCCATAATTAAACTTTGT |
| | | | | TGAATGTTTGACTCAATTTCTAGGAATACTTGAACACAAATTCTTGC |
| | | | | TATAAACGGTCTATAGCATAGAGGGTGTAATGGGCCAACCCATTTT |
| | | | | TACACTTTCCAAAAACAGCAACTGAAATTTCCATTGGG |
| 13 | Amaranthus | gDNA | 1737 | AAAAAAAAAGCAAAGAATTTAGAATCCAAATCAATCTTGATATTCA |
| | rudis | Contig | | AGGGTATTTAAGTAATTAGAGAACAACCATAGTTAAGTTAAGCGCC |
| | | | | TCCACTCATTTCTCTTCGTCCTTCTCGGTGATTCCCTTTCTCCATTTTC |
| | | | | GCTTAGCTCTCCTCTCACACAAATTACCTCCATTTCCAACCTTCCAAG |
| | | | | CTTTCAACAATGGCGTCCACTTCTTCAAACCCACCATTTTCCTATTTT |
| | | | | ACTAAACCTTACAAAATCCCTAATCGTCAATCCTACATTTACGCTCTC |
| | | | | CCTTTTTCCAATTCTCATAAACCCACTTCTTCTTCAATCCTCCGCCGCG |
| | | | | CTCTTCAAATCTCGTCATCTTCTTCTCAATCACCTAAACCTAAACCTCC |
| | | | | TTCCGCTACTATAACTCAATCACCTTCATCTCTCACCGATGATAAACC |
| | | | | CTCTTCTTTTGTTTCCCGATTTAGCCCTGAGGAACCCAGAAAAGGTT |
| | | | | GCGATGTTCTCGTTGAAGCTCTTGAACGTGAAGGTGTTACCGATGT |
| | | | | TTTTGCTTACCCTGGTGGAGCTTCCATGGAAATCCATCAAGCTCTTA |
| | | | | CTCGTTCTAATATCATTAGAAATGTTCTTCCTCGACATGAACAAGGT |
| | | | | GGGGTTTTCGCTGCTGAAGGCTACGCTCGTGCTACTGGACGTGTTG |
| | | | | GAGTTTGTATTGCCACTTCTGGTCCGGGTGCTACTAATCTTGTTTCC |
| | | | | GGTTTTGCTGATGCACTTCTTGACTCAGTCCCGCTTGTCGCCATTACT |
| | | | | GGGCAAGTTCCTCGGCGTATGATTGGTACTGATGCTTTTCAAGAGA |
| | | | | CTCCTATTGTTGAGGTAACTCGATCAATTACTAAGCATAATTATTTG |
| | | | | GTGTTAGATGTTGAGGATATCCCTAGAATTGTTAAGGAAGCTTTCTT |
| | | | | TTTAGCTAATTCTGGTAGAACTGACCTGTTTTGATTGATATTCCTAAA |
| | | | | GATATTCAGCAACAATTGGTTGTTCCTAACTGGGAACAACCCATTAA |
| | | | | ATTGGGTGGGTATCTTTCTAGGTTGCCTAAACCCACTTATTCTCCTTA |
| | | | | TGAAGAGGGACTTCTTGATCAAATTGTGAGGTTGGTGGTTGAAGAA |
| | | | | GCCATTGATGAAGATGGTTGAAGAATTCAAATCAATGTTGGGGTTT |
| | | | | TGAAGGTTTTGTTGTGTGCCATTGATGAAGAGATTTAAGGAAGAAA |
| | | | | TCATTAATGGGTAGATTGAGGAAGAAGGTGATGAAGAAGCTATTG |
| | | | | ATGAAGATGGTAACATGTTGTTCCAGGTAACTAAAACCGATTGTTCT |
| | | | | TTAAAAGCGGAGACCCCCAAAGTTCGAGTCTTTAAAAGATAAACGC |
| | | | | AAGTTTAAACCTTTAAAAGCAAATGAGCTAAAGTTCGTACCTTTAGA |
| | | | | ATCAAATTTTCCAAAATAATATTAACCATCTTATCGATTTGCGTGCTG |
| | | | | AAAAATCGGCGCCTAAATATTCATTTCGATTGTATTTTCAAACTAGG |
| | | | | AGCCCTATAAGAATTATAATTATGTCCATATTTCAAAAAAAAATTAC |
| | | | | ACTATTAAAAAATTTAGGAAAAATTACCTAAAATAATCCAATCTTTT |
| | | | | ATTCATTTTTCTAGAATAATCCTAACTTTTGATTAACCATGAATAATA |
| | | | | AAACCAATTTTAGGGTCACTTATTCAAGAACATTGTTACCCAAATAG |
| | | | | TGACTGATTTTTGTAGGTTTTTTTTTCGGAAATTCGGAATTAGTATAT |
| | | | | ATGAAAAAGAAAAAAAGAAAACACTGAATCATGCATCCTT |
| 14 | Amaranthus | gDNA | 1719 | AAAAAAAAAAAAAAAAGCAAAGAATTTAGAATCCAAATCAATCTTG |
| | rudis | Contig | | ATATTCAAGGGTATTTAAGTAATTAGAGAACAACCATAGTTAAGTTA |
| | | | | AGCGCCTCCACTCATTTCTCTTCGTCCTTCTCAGTGATTCCCTTTCTCC |
| | | | | ATTTTCGCTTAGCTCTCCTCTCACACAAATTACCTCCATTTCCAACCTT |
| | | | | CCAAGCTTTCAACAATGGCGTCCACTTCTTCAAACCCACCATTTTTCT |
| | | | | ATTTTACTAAACCTTACAAAATCCCTAATCGTCAATCCTACATTTACG |
| | | | | CTCTCCCTTTTTCCAATTCTCATAAACCCACTTCTTCTTCTTCTTCTTCT |
| | | | | TCAATCGTCCGCCGCGCTCTTCAAATCTCATTATCTTCTTCTCAATCA |
| | | | | CCTAAACCTAAACCTCCTTCCGCTACTATAACTCAATCACCTTCATCT |
| | | | | CTCACCGATGATAAACCCTCTTCTTTTGTTTCCCGATTTAGCCCTGAT |
| | | | | GAACCCAGAAAAGGTTGCGATGTTCTTGTTGAAGCTCTTGAACGTG |
| | | | | AAGGTGTTACCGATGTTTTTGCTTACCCTGGTGGAGCTTCCATGGAA |
| | | | | ATCCATCAAGCTCTTACTCGTTCTAATATCATTAGAAATGTTCTTCCT |
| | | | | CGACATGAACAAGGTGGGGTTTTCGCTGCTGAAGGCTACGCTCGTG |
| | | | | CTACTGGACGTGTTGGAGTTTGTATTGCCACTTCTGGTCCGGGTGCT |
| | | | | ACTAATCTTGTTTCCGGTTTTGCTGATGCACTTCTTGACTCAGTCCCG |
| | | | | CTTGTCGCCATTACTGGGCAAGTTCCTCGGCGTATGATTGGTACTGA |
| | | | | TGCTTTTCAAGAGACTCCTATTGTTGAGGTAACTCGATCAATTACTA |
| | | | | AGCATAATTATTTGGTGTTAGATGTTGAGGATATCCCTAGAATTGTT |
| | | | | AAGGAAGCTTTCTTTTTAGCTAATTCTGGTAGACCTGGACCTGTTTT |
| | | | | GATTGATATTCCTAAAGATATTCAGCAACAATTGGTTGTTCCTAACT |
| | | | | GGGAACAGCCCATTAAATTGGGTGGGTATCTTTCTAGGTTGCCTAA |
| | | | | ACCCACTTATTCTGCTAATGAAGAGGGACTTCTTGATCAAATTGTGA |
| | | | | GGTTGGTGGGTGAGTCTAAGAGACCTGTGCTGTATACTGGAGGTG |
| | | | | GGTGTTTGAATTCTAGTGAAGAATTAAGGAAATTTGTCGGGTTGAC |
| | | | | AGGGATTCCGGTTGCTAGTACTTTAATGGGGTTGGGGGCTTTCCCT |
| | | | | TGTACTGATGATTTATCACTTCAAATGTTGGGAATGCACGGGACTGT |
| | | | | GTACGCGAATTACGCGGTGGATAAGGCTGATTTGTTGCTTGCTTTC |
| | | | | GGGGTTAGGTTTGATGATCGAGTGACTGGGAAGCTCGAGGCGTTT |
| | | | | GCTAGCCGGGCTAAGATTGTGCACATCGATATTGATTCTGCTGAAA |
| | | | | TCGGGAAGAATAAGCAACCTCATGTGTCGATTTGTGGTGATATTAA |
| | | | | AGTGGCATTACAGGGGTTGAATAAGATTTTGGAATCTAGAAAAGG |
| | | | | AAAGCTGAAATTGGATTTCTCTAATTGGAGGGAGGAGTTGAATGAG |
| | | | | CAGAAAAAGAAGTTTCCTTTGAGTTTTAAGACTTTCGGGGATGCAA |
| | | | | TTCCTCCGCAATATGCCATTCAGGTTCTGGACGAGTTGACGAAGGG |
| | | | | TGATGCGATTGTAAGTACCGGTGTTGGGCAGCACCAAATGTGGGCT |
| | | | | GCCCAATTCTATAAGTACCGAAATCCTCGCCA |
| 15 | Amaranthus | gDNA | 725 | AAATTTGCTGAAGCATGTGATATACCAGCAGCCCGTGTTACCAAGG |
| | rudis | Contig | | TGAGCGATTTAAGGGCTGCAATTCAAACAATGTTGGATACTCCAGG |
| | | | | ACCATATCTGCTGGATGTAATCGTACCACATCAGGAGCATGTGCTG |
| | | | | CCTATGATCCCTAGCGGTGCCGCCTTCAAGGACACCATCACAGAGG |
| | | | | GTGATGGAAGAAGGGCTTATTAGTTGGTTGGAGATCTTTATAGAGG |
| | | | | AGAAGCTTTTTTGTATGTATGTTAGTAGTTCCATAAACTTCTATATTC |
| | | | | TCTGGCCGTCCTCTCGTTTAGCTGTTTTTATGTTAGTTTATTGTTTTCA |
| | | | | TGTTGCTTGTTACTTTGAAAAACCCTTTTGTGTTTTAAGACCCATTAG |
| | | | | CATGAATAATCTTCCTATACTATTGTATGGTTCGATACACGCTAGTT |
| | | | | GTTTCTTTTTATTAACGAGTTAAAGACAACTATTAGTCGGTGTAATC |
| | | | | AAGTCTGTCTCACATTGCTTGACATTTTGTTCTCCTTTGATGAATTTG |
| | | | | ATATTAGGAAGTTTGTTTGGTACTAGTGAATCTTCATGTCCTATACT |
| | | | | GTTTTCTCGTCTTAGCGGACATTGGTATTGTATCTCTTGGTGGGTTTT |
| | | | | TTGTGGGTATAGGAGTATTCGATTCGTTGTTATGTTCGACTCCTTCA |
| | | | | ATGCTTTTGGTGGGTTTTTCAAAGAAGAAAAAGGAAGCAAAAATGG |
| | | | | CCTTAGAATGTAAAGTGGTG |
| 16 | Amaranthus | gDNA | 451 | TTAAAGTGGCATTACGGGGGTTGAATAATATTTTGGAATCTAGAAA |
| | rudis | Contig | | AGGAAAGGTGAAATTGGATTTCTCTAATTGGAGGGAGGAGTTGAA |
| | | | | TGAGCAGAAAAAGAAGTTTCCTTTGAGTTTTAAGACTTTCGGGGAT |
| | | | | GCAATTCCTCCGCAATATGCCATTCAGGTTCTGGACGAGTTGACGA |
| | | | | AGGGTGATGCGATTGTAAGTACCGGTGTTGGGCAGCACCAAATGT |
| | | | | GGGCTGCCCAATTCTATAAGTACCGAAATCCTCGCCAATGGCTGAC |
| | | | | CTCGGGTGGTTTGGGGGCTATGGGGTTTGGTCTACCAGCCGCTATT |
| | | | | GGAGCTGCTGTTGCTCGACCAGATGCGGTGGTTGTAGACATTGATG |
| | | | | GGGACGGGAGTTTTATCATGAATGTTCAAGAGTTGGCTACGATTAG |
| | | | | GGTAGAGAATCTCCCGGTTAAAATCATGCTCTTGAACAA |
| 17 | Amaranthus | gDNA | 375 | TCTTTCTAGGTTGCCTAAACCCACTTTTTCTGCTAATGAAGAGGGAC |
| | rudis | Contig | | TTCTTGATCAAATTGTGAGGTTGGTGGGTGAGTCTAAGAGACCTGT |
| | | | | GCTGTATACTGGAGGTGGGTGTTTGAATTCTAGTGAAGAATTAAGG |
| | | | | AAATTTGTCGAGTTGACAGGGATTCCGGTTGCTAGTACTTTAATGG |
| | | | | GGTTGGGGGCTTTCCCTTGTACTGATGATTTATCACTTCAAATGTTG |
| | | | | GGAATGCACGGGACTGTGTACGCGAATTACGCGGTGGATAAGGCT |
| | | | | GATTTGTTGCTTGCTTTCGGGGTTAGGTTTGATGATCGAGTGACTG |
| | | | | GGAAGCTCGAGGCGTTTGCTAGCCGGGCTAAGATTGTGCACATCGA |
| | | | | TATCGA |
| 18 | Amaranthus | cDNA | 2302 | CTTCCTTCTCAGTTATTCCATTTCTCCATTCTCGCTTAGCTTTCCTCTCT |
| | spinosus | Contig | | CACAAATTACCTCCATTTCCAAGCTTCCAAGCTTTCAACAATGGCGT |
| | | | | CCAGTTCTTCAAACCCACCATTATTCTATTTTACTAAACTTAACAAAA |
| | | | | TCCCTAATCGGCAATCATCCATTTACGCTATCCCGTTTTCTAATTCTCT |
| | | | | TAAACCCACTTCTTCTTCTTCAATCCTCCGCCGCCCTCTTCAAATCTCA |
| | | | | TCATCTTCTTCTCAATCACCTAAACCTAAACCTCCTTCCGCTACTATA |
| | | | | ACTCAGTCACCTTCATCTCTCACCGATGATAAACCCTCTTCTTTTGTTT |
| | | | | CCCGATTTAGCCCTGAAGAACCCAGAAAAGGTTGCGATGTTCTCGT |
| | | | | TGAAGCTCTTGAACGTGAAGGTGTTACCGATGTTTTTGCTTACCCTG |
| | | | | GTGGAGCATCCATGGAAATCCATCAAGCTCTTACTCGTTCTAATATC |
| | | | | ATTAGAAATGTTCTTCCTCGACATGAACAAGGTGGGGTTTTCGCTGC |
| | | | | TGAAGGCTACGCTCGTGCTACTGGACGCGTTGGAGTTTGTATTGCC |
| | | | | ACTTCTGGTCCAGGTGCTACTAATCTTGTCTCTGGTCTTGCTGATGC |
| | | | | ACTTCTTGACTCAGTCCCGCTTGTCGCCATTACTGGGCAAGTTCCCC |
| | | | | GGCGTATGATTGGTACTGATGCTTTTCAAGAGACTCCAATTGTTGAG |
| | | | | GTAACTCGATCCATTACTAAGCATAATTATTTGGTGTTAGATGTTGA |
| | | | | GGATATTCCTAGAATTGTTAAGGAAGCTTTCTTTTTAGCTAATTCTG |
| | | | | GTAGACCTGGACCTGTTTTGATTGATATTCCTAAAGATATTCAGCAA |
| | | | | CAATTAGTTGTTCCTAATTGGGAACAGCCCATTAAATTGGGTGGGT |
| | | | | ATCTTTCTAGGTTGCCTAAACCCACTTATTCTGCTAATGAAGAGGGA |
| | | | | CTTCTTGATCAAATTGTAAGGTTAGTGGGTGAGTCTAAGAGACCTG |
| | | | | TGCTGTATACTGGAGGTGGGTGTTTGAATTCTAGTGAAGAATTGAG |
| | | | | GAAATTTGTCAAATTGACAGGGATTCCGGTGGCTAGTACTTTAATG |
| | | | | GGGTTGGGGGCTTTCCCTTGTACTGATGATTTATCACTTCATATGCT |
| | | | | GGGAATGCACGGGACTGTGTATGCGAATTACGCGGTTGATAAGGC |
| | | | | CGATTTGTTGCTTGCTTTCGGGGTTAGGTTTGATGATCGAGTGACTG |
| | | | | GTAAGCTCGAGGCGTTTGCTAGCCGGGCTAAGATTGTGCACATCGA |
| | | | | TATCGATTCTGCTGAAATCGGGAAGAATAAGCAACCTCATGTGTCG |
| | | | | ATTTGTGGTGATGTTAAAGTGGCATTACAGGGGTTGAATAAGATTT |
| | | | | TGGAATCTAGAAAAGGAAAGGTGAAATTGGATTTCTCTAATTGGAG |
| | | | | GGAGGAGTTGAATGAGCAGAAAGAGAAGTTTCCTTTGAGTTTTAAG |
| | | | | ACTTTCGGGGATGCAATTCCTCCGCAATACGCCATTCAGGTTCTTGA |
| | | | | CGAGTTGACGAAGGGTGATGCGGTTGTAAGTACCGGTGTTGGGCA |
| | | | | GCACCAAATGTGGGCTGCCCAATTCTATAAGTACCGAAATCCTCGCC |
| | | | | AATGGCTGACCTCGGGTGGTTTGGGGGCTATGGGGTTTGGTCTACC |
| | | | | TGCTGCTATTGGAGCTGCTGTTGCTCGACCAGATGCGGTGGTTGTA |
| | | | | GACATCGATGGGGATGGGAGTTTTATCATGAATGTTCAAGAGTTGG |
| | | | | CTACGATTAGGGTGGAGAATCTCCCGGTTAAAATCATGCTCTTGAA |
| | | | | CAATCAACATTTAGGTATGGTTGTTCAATGGGAAGATCGATTTTACA |
| | | | | AAGCTAACCGGGCACATACATACCTCGGGAATCCTTCCAATTCTTCC |
| | | | | GAAATCTTCCCGGATATGCTCAAATTCGCTGAAGCATGTGATATACC |
| | | | | AGCAGCTCGTGTTACCAAGGTGAGCGATTTAAGGGCTGCAATTCAA |
| | | | | ACAATGTTGGATACTCCAGGACCGTATCTGCTGGATGTAATCGTACC |
| | | | | ACATCAGGAGCATGTGCTGCCTATGATCCCTAGCGGTGCCGCCTTC |
| | | | | AAGGACACCATCACTGAGGGTGATGGAAGAAGGGCTTATTAGTTG |
| | | | | GTTGGAGATCTTTATAGAGGAGAAGCTTTTTGTATGTATGTTAGTA |
| | | | | GTTCCATAAACTTCTATATTCTCTGGCCGGTCTCTCGTGTAGCTGTTT |
| | | | | TTATGTTAGTTTGTTGTTTTCATGTTGCGTGCTACTTTGAAAAAACCC |
| | | | | TTTTGTGTTTTAGACCCATTAGCATGAATAATCATCCTATATTATTGT |
| | | | | ATGGTTCGA |
| 19 | Amaranthus | cDNA | 2334 | TCTGGGTGATTCCCTTTCTCCATTCTCGCTTAACTTTCCTCTCACACA |
| | thunbergii | Contig | | AATTACCTTCATTTCCAACCTTTCAAGCTTTCAACAATGGCGTCCAAT |
| | | | | TCTTCAAACCCACCATTTTTCTATTTTACTATACCTTACAAAATCCCTA |
| | | | | ATCTGCAATCATCCATTTACGCTATCCCTTTTTCCGATTCTCTTAAACC |
| | | | | CACTTCTTCTTCTTCAATCCTCCGCCGCCCTCTTCAAATCTCATCATCT |
| | | | | TCTTCTCAATCACCTAAACCTAAACCTCCTTCCGCTACTATAACTCAA |
| | | | | TCACCTTCGTCTCTCACCGATGATAAACCCTCTTCTTTTGTTTCCCGA |
| | | | | TTTAGCCCTGAAGAACCCAGAAAAGGTTGCGATGTTCTCGTTGAAG |
| | | | | CTCTTGAACGTGAAGGTGTTACCGATGTTTTTGCTTACCCTGGTGGA |
| | | | | GCATCCATGGAAATTCATCAAGCTCTTACTCGTTCTAATATCATTAG |
| | | | | AAATGTTCTTCCTCGACATGAACAAGGTGGGGTTTTCGCTGCTGAA |
| | | | | GGCTACGCTCGTGCTACTGGACGCGTTGGAGTTTGTATTGCCACTTC |
| | | | | TGGTCCAGGTGCTACTAATCTTGTTTCTGGTCTTGCTGATGCACTTCT |
| | | | | TGACTCAGTCCCTCTTGTCGCCATTACTGGGCAAGTTCCCCGGCGTA |
| | | | | TGATTGGTACTGATGCTTTTCAAGAGACTCCAATTGTTGAGGTAACT |
| | | | | CGATCCATTACCAAGCATAATTATTTGGTGTTAGATGTTGAGGATAT |
| | | | | TCCTAGAATTGTTAAGGAAGCTTTCTTTTTAGCTAATTCTGGTAGAC |
| | | | | CTGGACCTGTTTTGATTGATATTCCTAAAGATATTCAGCAACAATTA |
| | | | | GTTGTTCCTAATTGGGAACAGCCCATTAAATTGGGTGGGTATCTTTC |
| | | | | TAGGTTGCCTAAACCCACTTATTCTGCTAATGAAGAGGGACTTGATC |
| | | | | AAATTGTAAGGTTAGTGGGTGAGTCTAAGAGACCTGTGCTGTATAC |
| | | | | TGGAGGTGGGTGTTTGAATTCTAGTGAAGAATTGAGGAAATTTGTC |
| | | | | GAATTGACAGGTATTCCGGTGGCTAGTACTTTAATGGGGTTGGGGG |
| | | | | CTTTCCCTTGTACTGATGATTTATGTCTTCATATGTTGGGAATGCACG |
| | | | | GGACTGTGTACGCGAATTACGCGGTTGATAAGGCCGATTTGTTGCT |
| | | | | TGCTTTTGGGGTTAGGTTTGATGATCGAGTGACTGGTAAGCTCGAG |
| | | | | GCGTTTGCTAGCCGGGCTAAGATTGTGCACATCGATATCGATTCTGC |
| | | | | TGAAATCGGGAAGAATAAGCAACCTCATGTGTCGATTTGTGGTGAT |
| | | | | GTTAAAGTGGCATTACAGGGGTTGAATAAGATTTTGGAATCTAGAA |
| | | | | AAGGAAAGGTGAAATTGGATTTCTCTAATTGGAGGGAGGAGTTGA |
| | | | | ATGAGCAGAAAAAGAAGTTTCCTTTGAGTTTTAAGACTTTCGGGGA |
| | | | | TGCAATTCCTCCGCAATACGCCATTCAGGTTCTTGACGAGTTGACGA |
| | | | | AGGGCGATGCGGTTGTAAGTACTGGTGTTGGGCAGCACCAAATGT |
| | | | | GGGCTGCCCAATTCTATAAGTACCGAAATCCTCGCCAATGGCTGAC |
| | | | | CTCGGGTGGTTTGGGGGCTATGGGGTTTGGTCTACCAGCTGCTATT |
| | | | | GGAGCTGCTGTTGCTCGACCAGATGCGGTGGTTGTAGACATTGATG |
| | | | | GGGATGGGAGTTTTATCATGAATGTTCAAGAGTTGGCTACGATTAG |
| | | | | GGTAGAGAATCTCCCGGTTAAAATCATGCTCTTGAACAATCAACATT |
| | | | | TAGGTATGGTTGTTCAATGGGAAGATCGATTTTACAAAGCTAACCG |
| | | | | GGCACATACATACCTCGGGAATCCTTCCAATTCTTCCGAAATCTTCC |
| | | | | CGGATATGCTCAAATTTGCTGAAGCATGTGATATACCAGCAGCCCG |
| | | | | TGTTACCAAGGTGAGCGATTTAAGGGCTGCAATTCAAACAATGTTG |
| | | | | GATACTCCAGGACCGTATCTGCTGGATGTAATCGTACCACATCAGG |
| | | | | AGCATGTGCTGCCTATGATCCCTAGCGGTGCCGCCTTCAAGGACAC |
| | | | | CATAACAGAGGGTGATGGAAGAAGGGCTTATTAGTTGGTTGGAGA |
| | | | | TCTTTATAGAGGAGAATCTTTTTTGTATGTATGTTAGTAGTTCCATAA |
| | | | | ACTTCTATATTCTCTGGCCGTTCTCTCGTTTAGCTGTTTTTATGTTAGT |
| | | | | TTGTTGTTTTCATGTTGCTTGCTACTTTGAAAAACCCTTTTGTGTTTTA |
| | | | | GACCCATTAGCATGAATAATCTTCCTATATTATTGTATGGTTCGATAC |
| | | | | ACGCTAGTTGTTTCTTTTTATTATCGAGTTAAAGACAA |
| 20 | Amaranthus | cDNA | 2360 | CGCCTCCACTCTGGGTGATTCCCTTTCTCCATTCTCGCTTAGCTTTCC |
| | viridis | Contig | | TCTCACACAAATTACCTTTATTTCCAACCTTTCAAGCTTTCAACAATG |
| | | | | GCGTCCACTTCTTCAAACCCACCATTTTCCTCTTTTACTAAACCTAAC |
| | | | | AAAATCCCTAATCTGCAATCATCCATTTACGCTATCCCTTTTTCCAAT |
| | | | | TCTCTTAAACCCACTTCTTCTTCTTCAATCCTCCGCCGCCCTCTTCAAA |
| | | | | TCTCATCATCTTCTTCTCAATCACCTAAACCTAAACCTCCTTCCGCTAC |
| | | | | TATAACTCAATCACCTTCGTCTCTCACCGATGATAAACCCTCTTCTTT |
| | | | | TGTTTCCCGATTTAGCCCTGAAGAACCCAGAAAAGGTAGCGATGTT |
| | | | | CTCGTTGAAGCTCTTGAACGTGAAGGTGTTACCGATGTTTTTGCTTA |
| | | | | CCCTGGTGGAGCATCCATGGAAATTCATCAAGCTCTTACTCGTTCTA |
| | | | | ATATCATTAGAAATGTTCTTCCTCGACATGAACAAGGTGGGGTTTTC |
| | | | | GCTGCTGAAGGCTACGCTCGTGCTACTGGACGCGTTGGAGTTTGTA |
| | | | | TTGCCACTTCTGGTCCAGGTGCTACTAATCTTGTTTCTGGTCTTGCTG |
| | | | | ATGCACTTCTTGACTCAGTCCCTCTTGTCGCCATTACTGGGCAAGTT |
| | | | | CCCCGGCGTATGATTGGTACTGATGCTTTTCAAGAGACTCCAATTGT |
| | | | | TGAGGTAACTCGATCCATTACCAAGCATAATTATTTGGTGTTAGATG |
| | | | | TTGAGGATATTCCTAGAATTGTTAAGGAAGCTTTCTTTTTAGCTAATT |
| | | | | CTGGTAGACCTGGACCTGTTTTGATTGATATTCCTAAAGATATTCAG |
| | | | | CAACAATTAGTTGTTCCTAATTGGGAACAGCCCATTAAATTGGGTG |
| | | | | GGTATCTTTCTAGGTTGCCTAAACCCACTTATTCTGCTAATGAAGAG |
| | | | | GGACTTCTTGATCAAATTGTAAGGTTAGTGGGTGAGTCTAAGAGAC |
| | | | | CTGTGCTGTATACTGGAGGTGGGTGTTTGAATTCTAGTGAAGAATT |
| | | | | GAGGAAATTTGTCGAATTGACAGGTATTCCGGTGGCTAGTACTTTA |
| | | | | ATGGGGTTGGGGGCTTTCCCTTGTACTGATGATTTATGTCTTCATAT |
| | | | | GTTGGGAATGCACGGGACTGTGTACGCGAATTACGCGGTTGATAA |
| | | | | GGCCGATTTGTTGCTTGCTTTTGGGGTTAGGTTTGATGATCGAGTG |
| | | | | ACTGGTAAGCTCGAGGCGTTTGCTAGCCGGGCTAAGATTGTGCACA |
| | | | | TCGATATCGATTCTGCTGAAATCGGGAAGAATAAGCAACCTCATGT |
| | | | | GTCGATTTGTGGTGATGTTAAAGTGGCATTACAGGGGTTGAATAAG |
| | | | | ATTTTGGAATCTAGAAAAGGAAAGGTGAAATTGGATTTCTCTAATT |
| | | | | GGAGGGAGGAGTTGAATGAGCAGAAAAAGAAGTTTCCTTTGAGTT |
| | | | | TTAAGACTTTCGGGGATGCAATTCCTCCGCAATACGCCATTCAGGTT |
| | | | | CTTGACGAGTTGACGAAGGGCGATGCGGTTGTAAGTACTGGTGTTG |
| | | | | GGCAGCACCAAATGTGGGCTGCCCAATTCTATAAGTACCGAAATCC |
| | | | | TCGCCAATGGCTGACCTCGGGTGGTTTGGGGGCTATGGGGTTTGGT |
| | | | | CTACCAGCTGCTATTGGAGCTGCTGTTGCTCGACCAGATGCGGTGG |
| | | | | TTGTAGACATTGATGGGGATGGGAGTTTTATCATGAATGTTCAAGA |
| | | | | GTTGGCTACGATTAGGGTAGAGAATCTCCCGGTTAAAATCATGCTC |
| | | | | TTGAACAATCAACATTTAGGTATGGTTGTTCAATGGGAAGATCGATT |
| | | | | TTACAAAGCTAACCGGGCACATACATACCTCGGGAATCCTTCCAATT |
| | | | | CTTCCGAAATCTTCCCGGATATGCTCAAATTTGCTGAAGCATGTGAT |
| | | | | ATACCAGCAGCCCGTGTTACCAAGGTGAGCGATTTAAGGGCTGCAA |
| | | | | TTCAAACAATGTTGGATACTCCAGGACCGTATCTGCTGGATGTAATC |
| | | | | GTACCACATCAGGAGCATGTGCTGCCTATGATCCCTAGCGGTGCCG |
| | | | | CCTTCAAGGACACCATAACAGAGGGTGATGGAAGAAGGGCTTATT |
| | | | | AGTTGGTTGGAGATCTTTATAGAGGAGAATCTTTTTTGTATGTATGT |
| | | | | TAGTAGTTCCATAAACTTCTATATTCTCTGGCCGTTCTCTCGTTTAGC |
| | | | | TGTTTTTATGTTAGTTTGTTGTTTTCATGTTGCTTGCTACTTTGAAAA |
| | | | | ACCCTTTTGTGTTTTAGACCCATTAGCATGAATAATCTTCCTATATTA |
| | | | | TTGTATGGTTCGATACACGCTAGTTGTTTCTTTTTATTATCGAGTTAA |
| | | | | AGACAACTACTAATCGGTGT |
| 21 | Amaranthus | cDNA | 2357 | CTTCCTTCTCAGTTATTCCATTTCTCCATTCTCGCTTAGCTTTCCTCTCT |
| | viridis | Contig | | CACAAATTACCTCCATTTCCAAGCTTCCAAGCTTTCAACAATGGCGT |
| | | | | CCAGTTCTTCAAACCCACCATTATTCTATTTTACTAAACTTAACAAAA |
| | | | | TCCCTAATCGGCAATCATCCATTTACGCTATCCCGTTTTCTAATTCTCT |
| | | | | TAAACCCACTTCTTCTTCTTCAATCCTCCGCCGCCCTCTTCAAATCTCA |
| | | | | TCATCTTCTTCTCAATCACCTAAACCTAAACCTCCTTCCGCTACTATA |
| | | | | ACTCAGTCACCTTCATCTCTCACCGATGATAAACCCTCTTCTTTTGTTT |
| | | | | CCCGATTTAGCCCTGAAGAACCCAGAAAAGGTTGCGATGTTCTCGT |
| | | | | TGAAGCTCTTGAACGTGAAGGTGTTACCGATGTTTTTGCTTACCCTG |
| | | | | GTGGAGCATCCATGGAAATCCATCAAGCTCTTACTCGTTCTAATATC |
| | | | | ATTAGAAATGTTCTTCCTCGACATGAACAAGGTGGGGTTTTCGCTGC |
| | | | | TGAAGGCTACGCTCGTGCTACTGGACGCGTTGGAGTTTGTATTGCC |
| | | | | ACTTCTGGTCCAGGTGCTACTAATCTTGTTTCTGGTCTTGCTGATGC |
| | | | | ACTTCTTGACTCAGTCCCTCTTGTCGCCATTACTGGGCAAGTTCCCC |
| | | | | GGCGTATGATTGGTACTGATGCTTTTCAAGAGACTCCAATTGTTGAG |
| | | | | GTAACTCGATCCATTACCAAGCATAATTATTTGGTGTTAGATGTTGA |
| | | | | GGATATTCCTAGAATTGTTAAGGAAGCTTTCTTTTTAGCTAATTCTG |
| | | | | GTAGACCTGGACCTGTTTTGATTGATATTCCTAAAGATATTCAGCAA |
| | | | | CAATTAGTTGTTCCTAATTGGGAACAGCCCATTAAATTGGGTGGGT |
| | | | | ATCTTTCTAGGTTGCCTAAACCCACTTATTCTGCTAATGAAGAGGGA |
| | | | | CTTCTTGATCAAATTGTAAGGTTAGTGGGTGAGTCTAAGAGACCTG |
| | | | | TGCTGTATACTGGAGGTGGGTGTTTGAATTCTAGTGAAGAATTGAG |
| | | | | GAAATTTGTCGAATTGACAGGTATTCCGGTGGCTAGTACTTTAATG |
| | | | | GGGTTGGGGGCTTTCCCTTGTACTGATGATTTATGTCTTCATATGTT |
| | | | | GGGAATGCACGGGACTGTGTACGCGAATTACGCGGTTGATAAGGC |
| | | | | CGATTTGTTGCTTGCTTTTGGGGTTAGGTTTGATGATCGAGTGACTG |
| | | | | GTAAGCTCGAGGCGTTTGCTAGCCGGGCTAAGATTGTGCACATCGA |
| | | | | TATCGATTCTGCTGAAATCGGGAAGAATAAGCAACCTCATGTGTCG |
| | | | | ATTTGTGGTGATGTTAAAGTGGCATTACAGGGGTTGAATAAGATTT |
| | | | | TGGAATCTAGAAAAGGAAAGGTGAAATTGGATTTCTCTAATTGGAG |
| | | | | GGAGGAGTTGAATGAGCAGAAAAAGAAGTTTCCTTTGAGTTTTAAG |
| | | | | ACTTTCGGGGATGCAATTCCTCCGCAATACGCCATTCAGGTTCTTGA |
| | | | | CGAGTTGACGAAGGGCGATGCGGTTGTAAGTACTGGTGTTGGGCA |
| | | | | GCACCAAATGTGGGCTGCCCAATTCTATAAGTACCGAAATCCTCGCC |
| | | | | AATGGCTGACCTCGGGTGGTTTGGGGGCTATGGGGTTTGGTCTACC |
| | | | | AGCTGCTATTGGAGCTGCTGTTGCTCGACCAGATGCGGTGGTTGTA |
| | | | | GACATTGATGGGGATGGGAGTTTTATCATGAATGTTCAAGAGTTGG |
| | | | | CTACGATTAGGGTAGAGAATCTCCCGGTTAAAATCATGCTCTTGAAC |
| | | | | AATCAACATTTAGGTATGGTTGTTCAATGGGAAGATCGATTTTACAA |
| | | | | AGCTAACCGGGCACATACATACCTCGGGAATCCTTCCAATTCTTCCG |
| | | | | AAATCTTCCCGGATATGCTCAAATTTGCTGAAGCATGTGATATACCA |
| | | | | GCAGCCCGTGTTACCAAGGTGAGCGATTTAAGGGCTGCAATTCAAA |
| | | | | CAATGTTGGATACTCCAGGACCGTATCTGCTGGATGTAATCGTACCA |
| | | | | CATCAGGAGCATGTGCTGCCTATGATCCCTAGCGGTGCCGCCTTCA |
| | | | | AGGACACCATAACAGAGGGTGATGGAAGAAGGGCTTATTAGTTGG |
| | | | | TTGGAGATCTTTATAGAGGAGAATCTTTTTTGTATGTATGTTAGTAG |
| | | | | TTCCATAAACTTCTATATTCTCTGGCCGTTCTCTCGTTTAGCTGTTTTT |
| | | | | ATGTTAGTTTGTTGTTTTCATGTTGCTTGCTACTTTGAAAAACCCTTT |
| | | | | TGTGTTTTAGACCCATTAGCATGAATAATCTTCCTATATTATTGTATG |
| | | | | GTTCGATACACGCTAGTTGTTTCTTTTTATTATCGAGTTAAAGACAAC |
| | | | | TACTAATCGGTGT |
| 22 | Ambrosia | cDNA | 2075 | CACTCATTCAACAATGGCGGCCATCTCTCCCACAAACCCTTCCTTCAC |
| | trifida | Contig | | CACCAAACCGCCGTCATCTTCCGCCACCACACCACCACCACGTTCCA |
| | | | | CCTTCCTCCCCCGTTTCACATTCCCAATAACCTCCACTTCCCCAATAC |
| | | | | GACACCGTTTCCACATATCCAACGTTCTCTCCGACCACAAACCCACC |
| | | | | ATAACCCATTCCCCATCACCAACCGACCCATTCATCTCCCGTTATGCC |
| | | | | CCAGACCAGCCCCGTAAAGGCGCCGACGTCCTAGTCGAAGCTTTGG |
| | | | | AACGTGAAGGCGTCACCGACGTCTTCGCATACCCAGGAGGCGCCTC |
| | | | | AATGGAGATCCATCAAGCTCTGACCCGCTCCAAAACCATCCGAAAC |
| | | | | GTCCTTCCCCGTCATGAACAGGGCGGCGTCTTCGCCGCCGAAGGCT |
| | | | | ACGCACGCGCCTCCGGTCTTCCTGGCGTCTGTATTGCTACCTCTGGT |
| | | | | CCTGGAGCTACAAACCTAGTGAGTGGTCTTGCTGATGCATTATTAG |
| | | | | ACAGTGTTCCAATGGTTGCAATAACCGGTCAAGTTCCTAGAAGAAT |
| | | | | GATTGGTACCGATGCGTTTCAAGAAACCCCTATTGTTGAGGTAACA |
| | | | | CGTTCCATTACTAAACATAATTATTTAGTTTTGGATGTTGAAGATATT |
| | | | | CCTAGGGTTGTTAGGGAGGCTTTTTATCTTGCGTCCTCGGGTCGACC |
| | | | | CGGTCCGGTTTTAATTGATGTGCCTAAGGATATACAGCAGCAGTTG |
| | | | | GTAGTGCCTAAATGGGATGAGCCTATGAGGTTACCGGGTTATTTGT |
| | | | | CTCGGTTGCCGAAAACGGAGAATAATGGGCAGTTGGAACAGATTG |
| | | | | TTAGGTTGGTTAGTGAGGCGAAGAGGCCGGTTTTGTATGTAGGGG |
| | | | | GTGGGTGTTTGAATTCGGCGGATGAGTTGAGGCGGTTTGTGGAGT |
| | | | | TAACGGGGATACCGGTTGCGAGTACTTTGATGGGGCTTGGAGCGT |
| | | | | ATCCTGCTTCGAGTGATTTGTCGTTACATATGCTTGGGATGCATGGG |
| | | | | ACGGTTTATGCGAATTATGCGGTGGATAAGAGTGATTTGTTGCTTG |
| | | | | CGTTTGGGGTGAGGTTTGATGATCGTGTGACGGGGAAGCTTGAGG |
| | | | | CGTTTGCTAGTAGGGCGAAGATTGTTCATATTGATATTGATTCAGCG |
| | | | | GAGATTGGGAAGAATAAGCAGCCTCATGTGTCGATTTGTGGTGATA |
| | | | | TTAAGGTCGCGTTACAAGGGCTTAACGAGATTTTGGAGGAAAAGA |
| | | | | ATTCGGTGACTAATCTTGATTTTTCGAATTGGAGGAAGGAGTTGGA |
| | | | | CGAGCAAAAGGTTAAGTTTCCGCTGAGTTTTAAAACGTTTGGTGAA |
| | | | | GCTATTCCTCCGCAGTATGCCATTCAAGTGCTTGATGAGTTAACGGG |
| | | | | TGGGAATGCGATTATTAGCACTGGGGTCGGGCAGCATCAGATGTG |
| | | | | GGCAGCCCAGTTTTACAAATACAACAGACCTAGACAATGGCTGACC |
| | | | | TCGGGTGGACTAGGGGCAATGGGTTTTGGGCTGCCTGCGGCTATT |
| | | | | GGGGCGGCTGTTGCAAGACCTGATGCAGTAGTAGTTGATATCGATG |
| | | | | GCGATGGAAGCTTTATAATGAATGTTCAAGAGTTAGCAACCATCCG |
| | | | | TGTTGAAAACCTGCCTGTTAAGATTATGTTACTTAACAATCAGCATT |
| | | | | TGGGTATGGTGGTTCAGTGGGAGGATCGGTTTTACAAGGCGAATC |
| | | | | GGGCTCATACCTACTTAGGAAATCCGTCAAAAGAGTCTGAAATATT |
| | | | | CCCCAACATGTTGAAGTTTGCTGAAGCGTGTGATATACCGGCTGCC |
| | | | | CGAGTGACCCGAAAGGCAGATCTAAGAGCAGCTATTCAGAAGATG |
| | | | | TTGGATACACCTGGGCCTTACTTGTTGGATGTGATCGTGCCACATCA |
| | | | | AGAACATGTGTTGCCCATGATCCCGGCTGGTGGAGGTTTCATGGAT |
| | | | | GTGATCACCGAAGGCGATGGCAGAACGAAATACTAAGCTTCAAAG |
| | | | | TCGCATCGCATATATAGTGTGTTATGTAAGCAGTTTGTCGGTTTTGA |
| | | | | ATGTTTTGTTGTGTAATTTAGTTTCTGGTTATGAATGTTATGGA |
| 23 | Ambrosia | gDNA | 2540 | GAAGGCGTCACCGACGTCTTCGCGTACCCAGGCGGCGCCTCAGTGG |
| | trifida | Contig | | AGATCCACCAAGCTCTGACCCGCTCCACAACCATCCGAAACGTCCTT |
| | | | | CCCCGTCATGAACAGGGCGGCGTCTTCGCCGCCGAAGGCTACGCAC |
| | | | | GCGCCTCCGGTCTTCCTGGCGTCTGTATTGCTACCTCTGGTCCTGGA |
| | | | | GCTACAAACCTAGTGAGTGGTCTTGCTGATGCATTATTAGACAGTGT |
| | | | | TCCAATGGTTGCAATAACCGGTCAAGTTCCTAGAAGAATGATTGGA |
| | | | | ACCGATGCGTTTCAAGAAACCCCTATTGTTGAGGTAACACGTTCCAT |
| | | | | TACTAAACATAATTATTTAGTTTTGGATGTGGAAGATATTCCTAGGG |
| | | | | TTGTTAGGGAGGCTTTTTATCTTGCGTCTTCGGGTCGGCCCGGTCCG |
| | | | | GTTTTAATTGATGTGCCTAAGGATATACAGCAGCAGTTGGTAGTGC |
| | | | | CTAAATGGGATGAGCCTATGAGGTTACCGGGTTATTTGTCTCGGTT |
| | | | | GCCGAAAACGGAGAATAATGGGCAGTTGGAACAGATTGTTAGGTT |
| | | | | GGTTAGTGAGGCGAAGAGGCCGGTTTTGTATGTAGGGGGTGGGTG |
| | | | | TTTGAATTCGGCGGATGAGTTGAGGCGGTTTGTGGAGTTAACGGG |
| | | | | GATACCGGTTGCGAGTACTTTGATGGGGCTTGGAGCGTATCCTGCT |
| | | | | TCGAGTGATTTGTCGTTACATATGCTTGGGATGCATGGGACGGTTT |
| | | | | ATGCGAATTATGCGGTTGATAAGAGTGATTTGTTGCTTGCGTTTGG |
| | | | | GGTGAGGTTTGATGATCGTGTGACGGGGAAGCTTGAGGCGTTTGC |
| | | | | TAGTAGGGCGAAGATTGTTCATATTGATATTGATTCAGCGGAGATT |
| | | | | GGGAAGAATAAGCAGCCTCATGTGTCGATTTGTGGTGATATTAAGG |
| | | | | TCGCGTTACAAGGGCTTAACGAGATTTTGGAGGAAAAGAATTCGGT |
| | | | | GACTAATCTTGATTTTTCGAATTGGAGGAAGGAGTTGGACGAACAA |
| | | | | AAGGTTAAGTTTCCGCTGAGTTTTAAAACGTTTGGTGAAGCTATTCC |
| | | | | TCCGCAGTATGCCATTCAAGTGCTTGATGAGTTAACGGGTGGGAAT |
| | | | | GCGATTATTAGCACTGGGGTCGGGCAGCATCAGATGTGGGCAGCC |
| | | | | CAGTTTTACAAATACAACAGACCTAGACAATGGCTGACCTCGGGTG |
| | | | | GACTAGGGGCAATGGGTTTTGGGCTGCCTGCGGCTATTGGGGCGG |
| | | | | CTGTTGCAAGACCTGATGCGGTAGTAGTTGATATCGATGGCGATGG |
| | | | | AAGCTTTATAATGAATGTTCAAGAGTTAGCAACCATCCGTGTTGAAA |
| | | | | ACCTGCCTGTTAAGATTATGTTACTTAACAATCAGCATTTGGGTATG |
| | | | | GTGGTTCAGTGGGAGGATCGGTTTTACAAGGCGAATCGGGCTCATA |
| | | | | CCTACTTAGGAAATCCGTCAAAAGAGTCTGAAATATTCCCCAACATG |
| | | | | TTGAAGTTTGCTGAAGCGTGTGATATACCGGCTGCCCGAGTGACCC |
| | | | | GAAAGGCAGATCTAAGAGCAGCTATTCAGAAGATGTTGGATACACC |
| | | | | TGGGCCTTACTTGTTGGATGTGATCGTGCCACATCAAGAACATGTGT |
| | | | | TGCCCATGATCCCGGCTGGTGGAGGTTTCATGGATGTGATCACCGA |
| | | | | AGGCGATGGCAGAACGAAATACTAAGCTTCAAAGTCGCATCGCATA |
| | | | | TATAGTGTGTTATGTAAGCAGTTTGTCGGTTTTGAATGTTTTGTTTTG |
| | | | | TTGTGTAATTTAGTTTCTGGTTATGAATGTTATGGATCAGTTTGTCA |
| | | | | ACGTTTCTTTAATTTAATAGCTTTCATGAATAAATTTCAAAGATTTAT |
| | | | | CTTCTGTTTTATGTTTATATTGAAGACCAAAGTTATGTTTATGTTACA |
| | | | | CACCAGTGAACATGTTTTCTAAAGGTCATATGTTGTTTTCTATAATTC |
| | | | | CAAAAGAGTAGTTTGGTGATCCGTCTCTTTCAGTCCATTTGTGCTCT |
| | | | | CAGTTGTGTAGATGTCGATTATGTATGGTCACTCTGTGCTTTACATT |
| | | | | GTTGTACCAGGTTTGAAGGGTGAGTGTTCCTCCACGTTTCTACCTAA |
| | | | | ATTCTCTCGGCGGCGCTTCCATTTGTGGTGGCGTTCACGGCGGTTCT |
| | | | | TTAACTCATACTTTAACGTTCACCTGATGTAATCAAATGTTAATTACT |
| | | | | AACGCTTTTATGTCTCTTTCCTCTACATCAATTATAACATGTATTTATT |
| | | | | GCCCCCTTTTGTTCTTAGCTTTAATCTATACTATTAATGTATCTGGTA |
| | | | | TTAAGCCTTAGGTATGAAATTTCTTTCCCAAAGCTGTGCATCGCGAA |
| | | | | TGCTTTTAGATTAATATGTTGGTTTATGTATTATGTTTTCAAGGACTA |
| | | | | AATTTACATCTGATGCAATGTATACATGGTTAGCAAGGTTTACACCA |
| | | | | AAACATGCAGACAGATTAATTAAGTAAGATGTTAACCTTGAAAACA |
| | | | | TATGCAATGTTAATACTAACTCAGGTAAGATGTTAATACTAAATTTA |
| | | | | TGTATTATGTTTTCAAGGACTAAATT |
| 24 | Ambrosia | gDNA | 2141 | TCCGAAACGTCCTTCCCCGTCATGAACAGGGCGGCGTCTTCGCCGC |
| | trifida | Contig | | CGAAGGCTACGCACGCGCCTCCGGTCTTCCTGGCGTCTGTATTGCTA |
| | | | | CCTCTGGTCCTGGAGCTACAAACCTAGTGAGTGGTCTTGCTGATGC |
| | | | | ATTATTAGACAGTGTTCCAATGGTTGCAATAACCGGTCAAGTTCCTA |
| | | | | GAAGAATGATTGGTACCGATGCGTTTCAAGAAACCCCTATTGTTGA |
| | | | | GGTAACACGTTCCATTACTAAACATAATTATTTAGTTTTGGATGTTG |
| | | | | AAGATATTCCTAGGGTTGTTAGGGAGGCTTTTTATCTTGCGTCTTCG |
| | | | | GGTCGGCCCGGTCCGGTTTTAATTGATGTGCCTAAGGATATACAGC |
| | | | | AGCAGTTGGTAGTGCCTAAATGGGATGAGCCTATGAGGTTACCGG |
| | | | | GTTATTTGTCTCGGTTGCCGAAAACGGAGAATAATGGGCAGTTGGA |
| | | | | ACAGATTGTTAGGTTGGTTAGTGAGGCGAAGAGGCCGGTTTTGTAT |
| | | | | GTAGGGGGTGGGTGTTTGAATTCGGCGGATGAGTTGAGGCGGTTT |
| | | | | GTGGAGTTAACGGGGATACCGGTTGCGAGTACTTTGATGGGGCTT |
| | | | | GGAGCGTATCCTGCTTCGAGTGATTTGTCGTTACATATGCTTGGGAT |
| | | | | GCATGGGACGGTTTATGCGAATTATGCGGTTGATAAGAGTGATTTG |
| | | | | TTGCTTGCGTTTGGGGTGAGGTTTGATGATCGTGTGACGGGGAAGC |
| | | | | TTGAGGCGTTTGCTAGTAGGGCGAAGATTGTTCATATTGATATTGA |
| | | | | TTCAGCGGAGATTGGGAAGAATAAGCAGCCTCATGTGTCGATTTGT |
| | | | | GGTGATATTAAGGTCGCGTTACAAGGGCTTAACGAGATTTTGGAGG |
| | | | | AAAAGAATTCGGTGACTAATCTTGATTTTTCGAATTGGAGGAAGGA |
| | | | | GTTGGACGAGCAAAAGGTTAAGTTTCCGCTGAGTTTTAAAACGTTT |
| | | | | GGTGAAGCTATTCCTCCGCAGTATGCCATTCAAGTGCTTGATGAGTT |
| | | | | AACGGGTGGGAATGCGATTATTAGCACTGGGGTCGGGCAGCATCA |
| | | | | GATGTGGGCAGCCCAGTTTTACAAATACAACAAACCTAGACAATGG |
| | | | | CTGACCTCGGGTGGACTAGGGGCAATGGGTTTTGGGCTGCCTGCG |
| | | | | GCTATTGGGGCGGCTGTTGCAAGACCTGATGCGGTAGTAGTTGATA |
| | | | | TCGATGGCGATGGAAGCTTTATAATGAATGTTCAAGAGTTAGCAAC |
| | | | | CATCCGTGTTGAAAACCTGCCTGTTAAGATTATGTTACTTAACAATC |
| | | | | AGCATTTGGGTATGGTGGTTCAGTGGGAGGATCGGTTTTGCAAGG |
| | | | | CGAATCGGGCTCATAGCTACTTAGGAAATCCGTCAAAAGAGTCTGA |
| | | | | AATATTCCCCAACATGTTGAAGTTTGCCGAAGCATGTGATATACCGG |
| | | | | CTGCCCGAGTGACCCGAAAGGCAGATCTAAGAGCAGCTATTCAGAA |
| | | | | GATGTTGGATACACCTGGGCCTTACTTGTTGGATGTGATCGTGCCA |
| | | | | CATCAAGAACATGTGTTGCCCATGATCCCGGCTGGTGGAGGTTTCA |
| | | | | TGGATGTGATCACCGAAGGCGATGGCAGAACGAAATACTAAGCTTC |
| | | | | AAAGTCGCATCGCATATATAGTGTGTTATGTAAGCAGTTTGTCGGTT |
| | | | | TTGAATGTTTTGTTGTGTAATTTAGTTTCTGGTTATGAATGTTATGGA |
| | | | | TCAGTTTGTCAACGTTTCTTTAATTTAATAGCTTTCATGAATAAATTT |
| | | | | CAAAGATTTATCTTCTGTTTTATGTTTATATTGAAGACCAAAGTTATG |
| | | | | TTTATGTTAGTGACCAGTGAACATGTTTTCTAAAGGTCATATGTTGT |
| | | | | TTTCTATAATTCCAAGAGTTGTTTGGTGATCCGTCTCTTTCAGTCCAT |
| | | | | TTGTGCTCTCAGTTGTGTAGATGTCGATTATGTATGGTCAATAGATT |
| | | | | GTACTCTGTGCTTTACCAGGTTTGAAGGGTGAGTGTTCCTCCACGTT |
| | | | | TCTACCTAAATTCTCTCGGCGGCGCTTCCATTTGTGGTGGCGGTTTC |
| | | | | TACTCTTAACTCATACTTAAACGTTCACCTGATGTAATCTATACTATT |
| | | | | AATATATCTGGTATTAAGCCTTAGGTATGAAATTTCTTTCCCAAAGC |
| | | | | TGTGCAT |
| 25 | Ambrosia | gDNA | 687 | AAACAAAAGAATCGTCCGATTGTCCATCCTATGTCGTGAAAAAAAA |
| | trifida | Contig | | AAGAATAGAGAAATGGTACTATTGTAAATATATTTGAGCATTCATAT |
| | | | | GGTAGCAGAGCCGCCCATCTGTGTTGCTATTATTTCCTATATCTTCTC |
| | | | | TACTATTCTGTGTTGCTATTATTTTTAGAGGGTCAAAGTATCAAAGG |
| | | | | GTGACGAACCGGTTCGACCTCCGACTACCCGTCAGACCGGCCGGTC |
| | | | | CGCTTCAAAACGGTCTAATATTCTAAACACTGCTTGGTGGAAACTGA |
| | | | | AAATAACATCCACATGTTTTTTTGACACTTCATCATTGACACTTCTTC |
| | | | | TATTATAACCAGATAATAATAATAATCAAACACCAACCCTAGAACAC |
| | | | | ACTCATTCAACAATGGCGGCCATCTCTCCCACAAACCCTTCCCTCACC |
| | | | | ACCAAACCGCCGTCATCTTCCGCCGCCACACCACCACCACGTTCCAC |
| | | | | CTTCCTCCCCCGTTTCACATTCCCAATAACCTCCACTTCCCCAATACG |
| | | | | ACACCGTTTCCACATATCCAACGTTCTCTCCGACCACAAACCCACCAT |
| | | | | AACCCATTCCCCATCACCAACCGACCCATTCATCTCCCGTTACGCTCC |
| | | | | AGACCAGCCCCGTAAAGGCGCCGACGTCCTAGTCGAAGCTTTGGAA |
| | | | | CGTGAAGGCGTCACCGACGTCTTCGC |
| 26 | Ambrosia | gDNA | 322 | CCCTAGAACACACTCATTCAACAATGGCAGCCATCTCTCCCACAAAC |
| | trifida | Contig | | CCTTCCTTCACCACCAAACCGCCGTCATCTTCCGCCGCCACACCACCA |
| | | | | CCACGTTCCACCTTCCTCCCCCGTTTCACATTCCCAATAACCTCCACTT |
| | | | | CCCCAATACGACACCGTTTCCACATATCCAACGTTCTCTCCGACCAC |
| | | | | AAACCCACCATAACCCATTCCCCATCACCAACCGACCCATTCATCTCC |
| | | | | CGTTACGCTCCAGACCAGCCCCGTAAAGGCGCCGACGTCCTAGTCG |
| | | | | AAGCTTTGGAACGTGAAGGCGTCACCGACGTCTTCGC |
| 27 | Ambrosia | gDNA | 214 | GACCGACGTCTTCGCCTACCCAGACGGCGCCTCAATGGAGATACAC |
| | trifida | Contig | | CAACTTCTCACCCGCTCCACCACTATCCGAAACGTCCTCCGGTCACA |
| | | | | TCCTGAGATCGTGAACGGGTAAATATTTGATTTTCTTTATTATAATCA |
| | | | | TGTTATATAATAATTATATCATTTAAATAACATCGACTGATTCTCTAT |
| | | | | TCGTATGTTTTCCACTTGATCTATG |
| 28 | Chenopodium | cDNA | 2572 | CTGCTTGGTCTGGACCATATGTCAGAACATTTACTCTCACTATTGTCA |
| | album | Contig | | TTACTCACTACACCAGAGGCCACCATCATCAGAGTCCGTTCAACATC |
| | | | | ACCACTCTCCTGTCTAACACCTACTCCTTCTCTGTAGCTATAATCAGG |
| | | | | AACGTTTTGATCTGCCTGGTAATGAAGGAATTGGGAGCCAGAATGA |
| | | | | ACCTGAAGATTAGACTGGGTTGAATCAATCATGGAAGATCCAAATA |
| | | | | ACCCATGTTCAAAAATCCTAAAAACACCCAAAAACAAACAAACCCCA |
| | | | | CAAAATAGAAAGAACATCCATTGACCTAATTTCTCTCTCTTCAACCTT |
| | | | | CAATGCCTTCATCAATGGCGGCTACTTCCTCAAACCCTTCATTCTCCC |
| | | | | CTTTCCCAACCCTCTCTTCCAAAACCCCTAAACCCCAATCCTCCATTT |
| | | | | ACTCCCTCCCTTTTCCCACTAACCCCAAAACGCCATCTTCCTTCCTCC |
| | | | | GCCGCCCTCTCCAAATCTCCGCCTCTCAATCCGCTAACCCAAAACCG |
| | | | | CCATCCGCTACTCAAACCGCTGTTCCTTCCCCTCTCACCGAGGAAAA |
| | | | | CCCGCAATCTTTCGTTTCCCGATTTGCCCCTGATGAACCCAGAAAAG |
| | | | | GCTGTGATGTCCTCGTTGAAGCTTTGGAGCGTGAAGGTGTTACCAA |
| | | | | TGTGTTTGCTTACCCTGGTGGTGCATCAATGGAGATTCATCAAGCTC |
| | | | | TCACGCGCTCTGGTTCTATCAGGAACGTCCTCCCCCGGCACGAGCA |
| | | | | AGGTGGGGTTTTCGCTGCGGAAGGGTATGCTCGAGCTACTGGGCG |
| | | | | CGTGGGTGTGTGCATTGCAACCTCTGGTCCTGGTGCCACTAATCTTG |
| | | | | TATCGGGTCTCGCTGATGCGCTGCTTGATTCTGTCCCTTTGGTTGCG |
| | | | | ATCACTGGTCAGGTGCCTCGCCGAATGATTGGAACTGATGCATTTC |
| | | | | AGGAGACTCCTATTGTTGAGGTTACTCGTTCTATCACTAAGCATAAT |
| | | | | TATTTGGTTTTAGATGTTGAGGATATTCCTAGAGTTGTTAAGGAAGC |
| | | | | GTTTTTATTTAGCTAATTCTGGTAGGCCTGGACCTGTTTTGATTGATA |
| | | | | TTCCTAAAGATATTCAGCAACAATTGGTTGTGCCTAATTGGGATCAG |
| | | | | CCTATTAAGCTTGGTGGGTATGTTTCTAGGCTGCCAAAATCGAAGTT |
| | | | | TTCGGCGAATGAGGAAGGGCTTCTTGAGCAGATTGTGAGGTTGAT |
| | | | | GAGTGAGGCTAAGAAGCCTGTGTTGTATGTGGGAGGTGGGTGTTT |
| | | | | GAATTCTAGTGAGGAATTGAGGAAATTCGTCGAATTGACAGGGATT |
| | | | | CCGGTGGCTAGTACTTTGATGGGGTTAGGAGCTTACCCTTGTAATG |
| | | | | ATGAATTGTCCCTTCATATGTTGGGAATGCACGGGACTGTGTACGC |
| | | | | GAATTATGCTGTTGATAAGGCGGATTTGCTGCTTGCTTTCGGGGTTA |
| | | | | GGTTTGATGATCGTGTGACAGGGAAGCTCGAGGCGTTTGCTAGCCG |
| | | | | AGCTAAGATTGTGCACATTGATATTGATTCTGCTGAGATTGGGAAG |
| | | | | AATAAGCAGCCTCATGTGTCGATTTGTGCTGATGTTAAGCTGGCGTT |
| | | | | GAAGGGTATGAATAAGATTCTGGAGTCTCGAAAAGGGAAGTTGAA |
| | | | | TTTAGATTACTCTAGTTGGAGGGAGGAGTTGGGTGAGCAGAAGAA |
| | | | | GAAGTTTCCATTGAGTTTTAAGACCTTTGGTGAGGCTATTCCTCCCC |
| | | | | AATACGCCATTCAGATGCTCGATGAGCTAACTGATGGTAATGCTGTT |
| | | | | ATAAGTACTGGTGTTGGGCAACATCAAATGTGGGCTGCCCAGCATT |
| | | | | ACAAGTATCGAAACCCTCGACAGTGGCTGACCTCAGGTGGTTTAGG |
| | | | | AGCCATGGGATTCGGGCTACCAGCTGCCATTGGAGCAGCTGTGGCT |
| | | | | CGTCCAGAGTCAGTGGTTGTCGATATTGATGGGGATGGGAGTTTCA |
| | | | | TCATGAATGTGCAAGAATTAGCTACCATAAGGGTGGAAAATCTGCC |
| | | | | TGTTAAGATAATGCTCTTAAACAATCAACATTTAGGTATGGTGGTTC |
| | | | | AATGGGAAGACAGATTCTACAAAGCCAATAGAGCGCATACATACCT |
| | | | | TGGAAACCCTTCTAAAGAGTCTGAAATCTTCCCCGATATGCTCAAAT |
| | | | | TCGCTGAAGCCTGTGATATTCCTGCTGCCCGTGTTACCAAGGTGAGC |
| | | | | GAGTTGAGGGCCGCAATGCAGAAAATGTTGGATACTCCGGGGCCA |
| | | | | TACCTGCTGGATGTGATTGTACCTCATCAAGAGCATGTGCTGCCTAT |
| | | | | GATCCCAAGTGGTGCCGCCTTCAAAGATATCATTAACGAGGGTGAT |
| | | | | GGAAGAACATCTTATTAATCGCATTATCGATGATGATGCTTAAATCT |
| | | | | GTATGTATAATAATATGTTTAGAGAGGTTATGACTGTTTTCTCTTTA |
| | | | | GGTTAGTTTGTTGTTCACATGCTGCTTGCTACTACTATGATTAACTTT |
| | | | | TTTGTTGTTTTTGAGGTATTACTATGGATGATTAGCTCAAAGATTTC |
| | | | | ACAAAAGTGGTCTTTGAGCTATGTATGTTCTCTTGCGAAATACACTC |
| | | | | GTTGGCTC |
| 29 | Chenopodium | cDNA | 2103 | CCTCCGCCGCCCTCTCCAAATCTCCGCCTCTCAATCCGCTAACCCCAA |
| | album | Contig | | ACCTCCATCCGCTACTCAAACCGCTGTTCCATCCCCTCTCACTGACGA |
| | | | | AAACCCCCAATCTTTCGTTTCCCGATTTGCCCCTGATGAACCCAGAA |
| | | | | AAGGGTGTGATGTTCTTGTTGAAGCTTTGGAGCGTGAAGGTGTTAC |
| | | | | CAATGTGTTTGCTTACCCTGGTGGTGCATCAATGGAGATCCATCAAG |
| | | | | CTCTCACGCGCTCTACCTCGATCAGGAACGTCCTCCCCCGGCACGAG |
| | | | | CAAGGTGGGGTTTTCGCTGCGGAAGGGTATGCTCGAGCTACTGGG |
| | | | | CGCGTGGGTGTGTGCATTGCAACCTCTGGTCCTGGTGCCACTAATCT |
| | | | | TGTATCGGGTCTCGCTGATGCGCTGCTTGATTCTGTCCCTTTGGTTG |
| | | | | CGATCACTGGTCAGGTGCCTCGCCGAATGATTGGAACTGATGCATT |
| | | | | TCAGGAGACTCCTATTGTTGAGGTTACTCGTTCTATCACTAAGCATA |
| | | | | ATTATTTGGTTTTAGATGTTGAGGATATTCCTAGAGTTGTTAAGGAA |
| | | | | GCGTTTTTATTTAGCTAATTCTGGTAGGCCTGGACCTGTTTTGATTG |
| | | | | ATATTCCTAAAGATATTCAGCAACAATTGGTTGTGCCTAATTGGGAT |
| | | | | CAGCCTATTAAGCTTGGTGGGTATGTTTCTAGGCTGCCAAAATCGA |
| | | | | AGTTTTCGGCGAATGAGGAAGGGCTTCTTGAGCAGATTGTGAGGTT |
| | | | | GATGAGTGAGGCTAAGAAGCCTGTGTTGTATGTGGGAGGTGGGTG |
| | | | | TTTGAATTCTAGTGAGGAATTGAGGAAATTCGTCGAATTGACAGGG |
| | | | | ATTCCGGTGGCTAGTACTTTGATGGGGTTAGGAGCTTACCCTTGTA |
| | | | | ATGATGAATTGTCCCTTCATATGTTGGGAATGCACGGGACTGTGTA |
| | | | | CGCGAATTATGCTGTTGATAAGGCGGATTTGCTGCTTGCTTTCGGG |
| | | | | GTTAGGTTTGATGATCGTGTGACAGGGAAGCTCGAGGCGTTTGCTA |
| | | | | GCCGAGCTAAGATTGTGCACATTGATATTGATTCTGCTGAGATTGG |
| | | | | GAAGAATAAGCAGCCTCATGTGTCGATTTGTGCTGATGTTAAGCTG |
| | | | | GCGTTGAAGGGTATGAATAAGATTCTGGAGTCTCGAAAAGGGAAG |
| | | | | TTGAATTTAGATTACTCTAGTTGGAGGGAGGAGTTGGGTGAGCAGA |
| | | | | AGAAGAAGTTTCCATTGAGTTTTAAGACCTTTGGTGAGGCTATTCCT |
| | | | | CCCCAATACGCCATTCAGATGCTCGATGAGCTAACTGATGGTAATG |
| | | | | CTGTTATAAGTACTGGTGTTGGGCAACATCAAATGTGGGCTGCCCA |
| | | | | GCATTACAAGTATCGAAACCCTCGACAGTGGCTGACCTCAGGTGGT |
| | | | | TTAGGAGCCATGGGATTCGGGCTACCAGCTGCCATTGGAGCAGCTG |
| | | | | TGGCTCGTCCAGAGTCAGTGGTTGTCGATATTGATGGGGATGGGA |
| | | | | GTTTCATCATGAATGTGCAAGAATTAGCTACCATAAGGGTGGAAAA |
| | | | | TCTGCCTGTTAAGATAATGCTCTTAAACAATCAACATTTAGGTATGG |
| | | | | TGGTTCAATGGGAAGACAGATTCTACAAAGCCAATAGAGCGCATAC |
| | | | | ATACCTTGGAAACCCTTCTAAAGAGTCTGAAATCTTCCCCGATATGC |
| | | | | TCAAATTCGCTGAAGCCTGTGATATTCCTGCTGCCCGTGTTACCAAG |
| | | | | GTGAGCGAGTTGAGGGCCGCAATGCAGAAAATGTTGGATACTCCG |
| | | | | GGGCCATACCTGCTGGATGTGATTGTACCTCATCAAGAGCATGTGC |
| | | | | TGCCTATGATCCCAAGTGGTGCCGCCTTCAAAGATATCATTAACGAG |
| | | | | GGTGATGGAAGAACATCTTATTAATCGCATTATCGATGATGATGCTT |
| | | | | AAATCTGTATGTATAATAATATGTTTAGAGAGGTTATGACTGTTTTC |
| | | | | TCTTTAGGTTAGTTTGTTGTTCACATGCTGCTTGCTACTACTATGATT |
| | | | | AACTTTTTTGTTGTTTTTGAGGTATTACTATGGATGATTAGCTCAAA |
| | | | | GATTTCACAAAAGTGGTCTTTGAGCTATGTATGTTCTCTTGCGAAAT |
| | | | | ACACTCGTTGGCTC |
| 30 | Conyza | cDNA | 2379 | CGTGTTGTGGTCATACATCACCACGACGTCTGTGATGGTACCGAATT |
| | canadensis | Contig | | GATCAAAGTAATTCTTGAAATCACTTCCACACACACTACTCCTAGCT |
| | | | | CTCATTTTTTATTTCCTTTTTCATCCCCAGCAAAAACACGCACACATA |
| | | | | AATTAAATTCAAACGAATCAAACCCTAAAAACAACAAAAAAAAATA |
| | | | | ATACAATCTCACACACACATTTTCAAACATGGCGGCCGTAACTTCAC |
| | | | | CAAACCCACCTTTCACCACCACCACCACAAAACCACCGCATTCCGCC |
| | | | | ACCACATTTCACCGTCCCACCACCACTCATTTATCCTTCCCAACCCCA |
| | | | | CCAAAACGAAACCGTTTCCTTCACATCACCAACGTCCTCTCGGACCA |
| | | | | CAAACCCATCACTACCACCACTACAACCACCGTTCCACCACCTTCATT |
| | | | | CACTTCCCGTTTCGCCGCCGACCAACCCCGGAAGGGCTCCGACGTTC |
| | | | | TCGTAGAAGCCCTCGAACGTGAAGGCGTCACCGACGTCTTCGCTTA |
| | | | | CCCTGGTGGCGCGTCAATGGAGATCCACCAAGCTCTCACGCGCTCC |
| | | | | ACCACCATCCGCAACGTCCTCCCCCGCCATGAACAAGGTGGCATCTT |
| | | | | CGCCGCAGAAGGCTACGCACGTGCCTCCGGTCTCCCCGGCGTCTGT |
| | | | | ATAGCCACTTCCGGTCCCGGCGCCACAAACCTTGTCTCCGGCCTTGC |
| | | | | TGACGCGCTTCTTGACAGTGTCCCCGTCGTTGCCATCACCGGCCAAG |
| | | | | TTCCCCGGCGAATGATCGGAACTGATGCTTTTCAAGAAACACCCATT |
| | | | | GTTGAGGTAACAAGATCCATTACTAAACATAACTATTTGGTTTTAGA |
| | | | | TGTTGATGATATTCCAAGAATTGTTAGAGAAGCTTTTTATCTTGCCC |
| | | | | GGTCGGGTCGACCCGGACCCGTTTTGATTGATATTCCAAAAGATAT |
| | | | | ACAACAACAGTTATGTGTGCCTAAATGGGATGAGCCCATGAGGCTT |
| | | | | CCTGGTTATTTATCTAGGTTACCTAAGCCACCTAATGATGGTTTACTA |
| | | | | GAACAAATTGTGAGGTTAGTTGGAGAGTCGAAAAGGCCGGTTTTGT |
| | | | | ATGTAGGTGGTGGTTGTTTGAATTCGAGTGATGAGTTGAGACGGTT |
| | | | | TGTTGAGCTTACGGGTATTCCGGTAGCTAGTACTTTAATGGGTCTTG |
| | | | | GGTCTTATCCAGCTTCGAGTGATTTGTCTCTTCAAATGCTTGGAATG |
| | | | | CATGGAACTGTTTATGCGAATTATGCTGTTGATAAGGCGGATTTGTT |
| | | | | GCTTGCGTTTGGGGTTAGGTTTGATGACCGTGTGACTGGAAAGCTT |
| | | | | GAAGCTTTTGCTAGTAGAGCTAAGATTGTTCATATTGATATTGACTC |
| | | | | TGCTGAGATTGGGAAGAATAAGCAGCCACATGTGTCGGTTTGTGGT |
| | | | | GATATTAAGATTGCGTTACAGGGTCTTAACAAGATTTTAGAAGGGA |
| | | | | GGCGTGAGATGAGTAATCTTGATTTTTCGGCGTGGAGGGCAGAGTT |
| | | | | GGATGAACAAAAGGTGAACCATCCGTTGAGTTTTAAAACGTTCGGT |
| | | | | GAAGCTATTCCACCGCAATATGCTATTCAGGTGCTTGATGAGTTAAC |
| | | | | GGGTGGGAATGCTATTATAAGTACTGGGGTCGGGCAACATCAGAT |
| | | | | GTGGGCTGCTCAGTTTTACAAGTACAACAGACCTAGACAGTGGTTG |
| | | | | ACTTCAGGTGGACTAGGGGCTATGGGCTTTGGACTGCCTGCAGCCA |
| | | | | TTGGTGCAGCCGTTGCAAGACCTGATGCAGTGGTAGTGGATATCGA |
| | | | | TGGTGATGGAAGTTTTATCATGAATGTTCAAGAGTTGGCTACTATCC |
| | | | | GAGTGGAAAATCTTCCTGTCAAGGTTTTGTTACTCAATAATCAGCAT |
| | | | | TTGGGTATGGTGGTTCAATGGGAGGATCGTTTCTACAAGGCAAATA |
| | | | | GGGCGCATACCTACTTGGGGAACCCATCAAAGGAGGCTGAAATATT |
| | | | | TCCAAACATGTTGAAGTTTGCCGAAGCGTGTGATATACCAGCTGCA |
| | | | | CGAGTGACCCGTAAAGCTGATCTACGGGCGGCTATTCAGAAGATGT |
| | | | | TGGATACTCCTGGGCCTTACTTGTTGGATGTCATTGTGCCGCATCAA |
| | | | | GAACATGTTTTGCCGATGATTCCTGCTGGTGGGGGCTTCATGGATG |
| | | | | TGATCACCGAGGGTGATGGTAGAACGAAGTATTGAGCTTCAAAGTC |
| | | | | ACAACTTAGTTTCAAGTTTCAACCACTGTATGTAAACATCTAGCATCT |
| | | | | TTACTTAAGAGGTGTGAGCAGTTTGTTGGATTTGAAGTTAATTTCTT |
| | | | | GTTGTGTATTTTAGTTTCTGGTTTTTTGAATGTTCCGTAGTAGTGTAT |
| | | | | TGACTGTTCTTTTAGTAGCCTCATGAATAAATGTCTTTTTTTCCTTG |
| 31 | Conyza | gDNA | 5989 | CAAAATTAAAATTTAAAAGTACTGGATGTTCAAAGTTAACAAACAA |
| | canadensis | Contig | | GATAAAAATAATATGTGACTTGATAAACCATATATTGTTGTCTATCG |
| | | | | AGGGTGATCGACCTGCATCTTCATATCCCTAGTGTTGTGTCTCGACT |
| | | | | TTTTGCATGTGTCATCATTGTCAAGAACCAATTCTATTGTATCATAAC |
| | | | | GTTTACACTAGCTAATCAACCCAGGTTCTACCTGAGCATTTTATTAA |
| | | | | AATTTTAAAAGCAAAAAAAATTTTAAAAAGTGTATATAATTTTTGTT |
| | | | | ATTGATATATTATAACTCGGTTTTGAGATATTAAATTAATTAACATG |
| | | | | ATAATTTATATATATTAGTATATATTGCATTAACAAAACATAAAAAG |
| | | | | ACATTTTATAATATTATATTAAAAAAAATTTACTTTGATTCGAATAAA |
| | | | | AGAATAAATTTGTAGACATCATAAATAAAAGAAAACATTTTGAAAA |
| | | | | TATTTAATGGGCTATTTATCTTTAAAAAGATTTTTGATTAAATATGAC |
| | | | | ATTATAAATAGATAAAACATTTTAAAGAAATTTGTAAACATGACACA |
| | | | | TCATAATTGTTTTTAAAAATAATTTAAAAAGAATCCTTCTTTATTATA |
| | | | | TATAAAGATTACATATTAAATATATGTTGTTTCAATCTTACCTTTCTTT |
| | | | | TTAAATAAACTTAGCTAACTTTGATAGTTTGTTTTTTATTTTTTTTATT |
| | | | | TTTAAACAACAGATTGATTTTATTAATAGTTGGTTGAAAATTGATCA |
| | | | | ACCAATAAAAAGAAAAAATTAAATACAAAGAAGAGGACTTTTCAAC |
| | | | | CATTCATCCCAAGATATTTGCTTCTTTTTATAGCGATACCATAAAAAT |
| | | | | GAATGAGTTATAATCGAATCAACAAGAACATCATGTCTTTTATTGGA |
| | | | | GCAACCGAAGACTTTATAACTTTGATAGTTGAGTTGCGAAAATTTAT |
| | | | | TTAAAGTTCGACTGGGATATTTCTAATCTACTAGCTACAAACACTTG |
| | | | | AGCTAAAATTGAACCTTGAACATGGTAAGTAAATCATTTTGGAGAG |
| | | | | ATTTCATGCTTTCTCTGTATCTTAATTCTATTTGTCTAATTGGTTTGGT |
| | | | | CGCAACCCGAAACATGGTTAGAATTACATAAAAAACACAACGAAGT |
| | | | | GAAATCCGGTAGCTCGACCTTCGTTCGTTGGGAGTTTTTCCTCGTGT |
| | | | | CTTGGGTCACTGTAATTGGCACGAGGTTTTTTCACTCCTTTTGTAGTT |
| | | | | CTTACAGTTAATATTTCGGAAAGAGTCTAAATTTATTGTATTGCTTTT |
| | | | | TTTAGATTGTAATTATAATTATACCCTATTACAACTAGTGCCTTGTTA |
| | | | | GTTGTTTATTTTAAATAATATTTTCTGTCGTTCTAGGAAAAAAAAAAT |
| | | | | TGAACCTTGAACACTTAATGCGGAAGTAGTTAATACTTGCAAACTTA |
| | | | | AGGAATAAGTTAAGTAGGCTTTGATGCTATAGATAGTCCTAAGCCA |
| | | | | TCACTCTTCAAAACACAATTTACACAATATTTCTAGAAAAATCAAAA |
| | | | | CTTCCATAGATATGTGAAAATAATAAAATGGATGTATATACAAAAA |
| | | | | AAAAAACATAATAAAAAATTGAAAAACTTATACACGCGTACAAGCC |
| | | | | AATGATTATAGTCTAACTGGTTAGAGACATTTTAGGTTTATCTAAAG |
| | | | | TTTTGAGTCGATCTTTAGGAATGATAAGTTTAGGTTTTTTTTTTCTCT |
| | | | | GAATATTTATAACGGTCCATGGTCAACATTTTGTTTTCTAAGATACG |
| | | | | TGCAAGACTTACCATTATATGGTGATGTTTCTCTAATGTCACATACC |
| | | | | GACCAAATGTTTGTACAAAAATAAAAATAAATACGTGTATAAAAGT |
| | | | | CGGCAAACGAAAATTAAAAAAACAGGATCTCATACATTCACTTCCAC |
| | | | | ACACACTACTCCTAGCTCTCATTTTTTATTTCCTTTTTCATCCCCAGCA |
| | | | | AAAACACGCACACATAAATTAAATTCAAACGAATCAAACCCTAAAA |
| | | | | ACAACAAAAAAAAAATAATACAATCTCACACACACATTTTCAAACAT |
| | | | | GGCGGCCGTAACTTCACCAAACCCACCTTTCACCACCACCACCACAA |
| | | | | AACCACCGCATTCCGCCACCACATTTCACCGTCCCACCACCACTCATT |
| | | | | TATCCTTCCCAACCCCACCAAAACGAAACCGTTTCCTTCACATCACCA |
| | | | | ACGTCCTCTCGGACCACAAACCCATCACTACCACCACTACAACCACC |
| | | | | GTTCCACCACCTTCATTCACTTCCCGTTTCGCCGCCGACCAACCCCGG |
| | | | | AAGGGCTCCGACGTTCTCGTAGAAGCCCTCGAACGTGAAGGCGTCA |
| | | | | CCGACGTCTTCGCTTACCCTGGTGGCGCGTCAATGGAGATCCACCA |
| | | | | AGCTCTCACGCGCTCCACCACCATCCGCAACGTCCTCCCCCGCCATG |
| | | | | AACAAGGTGGCATCTTCGCCGCAGAAGGCTACGCACGTGCCTCCGG |
| | | | | TCTCCCCGGCGTCTGTATAGCCACTTCCGGTCCCGGCGCCACAAACC |
| | | | | TTGTCTCCGGCCTTGCTGACGCGCTTCTTGACAGTGTCCCCGTCGTT |
| | | | | GCCATCACCGGCCAAGTTCCCCGGCGAATGATCGGAACTGATGCTT |
| | | | | TTCAAGAAACACCCATTGTTGAGGTAACAAGATCCATTACTAAACAT |
| | | | | AACTATTTGGTTTTAGATGTTGATGATATTCCAAGAATTGTTAGAGA |
| | | | | AGCTTTTTATCTTGCCCGGTCGGGTCGACCCGGACCCGTTTTGATTG |
| | | | | ATATTCCAAAAGATATACAACAACAGTTATGTGTGCCTAAATGGGA |
| | | | | TGAGCCCATGAGGCTTCCTGGTTATTTATCTAGGTTACCTAAGCCAC |
| | | | | CTAATGATGGTTTACTAGAACAAATTGTGAGGTTAGTTGGAGAGTC |
| | | | | GAAAAGGCCGGTTTTGTATGTAGGTGGTGGTTGTTTGAATTCGAGT |
| | | | | GATGAGTTGAGACGGTTTGTTGAGCTTACGGGTATTCCGGTAGCTA |
| | | | | GTACTTTAATGGGTCTTGGGTCTTATCCAGCTTCGAGTGATTTGTCT |
| | | | | CTTCAAATGCTTGGAATGCATGGAACTGTTTATGCGAATTATGCTGT |
| | | | | TGATAAGGCGGATTTGTTGCTTGCGTTTGGGGTTAGGTTTGATGAC |
| | | | | CGTGTGACTGGAAAGCTTGAAGCTTTTGCTAGTAGAGCTAAGATTG |
| | | | | TTCATATTGATATTGACTCTGCTGAGATTGGGAAGAATAAGCAGCC |
| | | | | ACATGTGTCGGTTTGTGGTGATATTAAGATTGCGTTACAGGGTCTTA |
| | | | | ACAAGATTTTAGAAGGGAGGCGTGAGATGAGTAATCTTGATTTTTC |
| | | | | GGCGTGGAGGGCAGAGTTGGATGAACAAAAGGTGAACCATCCGTT |
| | | | | GAGTTTTAAAACGTTCGGTGAAGCTATTCCACCGCAATATGCTATTC |
| | | | | AGGTGCTTGATGAGTTAACGGGTGGGAATGCTATTATAAGTACTGG |
| | | | | GGTCGGGCAACATCAGATGTGGGCTGCTCAGTTTTACAAGTACAAC |
| | | | | AGACCTAGACAGTGGTTGACTTCAGGTGGACTAGGGGCTATGGGC |
| | | | | TTTGGACTGCCTGCAGCCATTGGTGCAGCCGTTGCAAGACCTGATG |
| | | | | CAGTGGTAGTGGATATCGATGGTGATGGAAGTTTTATCATGAATGT |
| | | | | TCAAGAGTTGGCTACTATCCGAGTGGAAAATCTTCCTGTCAAGGTTT |
| | | | | TGTTACTCAATAATCAGCATTTGGGTATGGTGGTTCAATGGGAGGA |
| | | | | TCGTTTCTACAAGGCAAATAGGGCGCATACCTACTTGGGGAACCCA |
| | | | | TCAAAGGAGGCTGAAATATTTCCAAACATGTTGAAGTTTGCCGAAG |
| | | | | CGTGTGATATACCAGCTGCACGAGTGACCCGTAAAGCTGATCTACG |
| | | | | GGCGGCTATTCAGAAGATGTTGGATACTCCTGGGCCTTACTTGTTG |
| | | | | GATGTCATTGTGCCGCATCAAGAACATGTTTTGCCGATGATTCCTGC |
| | | | | TGGTGGGGGCTTCATGGATGTGATCACCGAGGGTGATGGTAGAAC |
| | | | | GAAGTATTGAGCTTCAAAGTCACAACTTAGTTTCAAGTTTCAACCAC |
| | | | | TGTATGTAAACATCTAGCATCTTTACTTAAGAGGTGTGAGCAGTTTG |
| | | | | TTGGATTTGAAGTTAATTTCTTGTTGTGTATTTTAGTTTCTGGTTTTTT |
| | | | | GAATGTTCCGTAGTAGTGTATTGACTGTTCTTTTAGTAGCCTCATGA |
| | | | | ATAAATGTCTTTTTTTCCTTGCCTGCGTAGTTTTGTAGAAGTAATCTT |
| | | | | CTGTTTCTATGTTTATAGCAAGGACCAAAAGAAGAGTATTAGAGCC |
| | | | | CCTGGTCTAAAAGTCGGATATCTGAAGTCAAATTTTAGCCCCTATTA |
| | | | | AGATATGTCTCTTTTTGATTGTGGTCAATACTAGCTGTAAGATACCA |
| | | | | TTTGAGATCAGCAATTACCCGTTGCGGTTTCATTTTGGTTTGGTCTG |
| | | | | GTCTGGTCTGGTCTGGTCTATTTCTTGTTGTGTAGTTTCTGCTATTTG |
| | | | | TGGGCTATATGTTCTGGTTTTCTTGGGTTACTGTGTTTGGGCTTAGT |
| | | | | ATTACAATCTATTAGTTTTGAAGTTGGTTCATATTTAGTAAACTATAA |
| | | | | ATTTTCAAAAACTATTCTTGATCGGTCCAGCATCAGTATATACTGGTT |
| | | | | CAGAAACTTGATAGATGTTGCTCAATCTTTCCGTCCTGAATGGGGCA |
| | | | | TTGATTGTTAGGATGTTTTTGTATAGGGTGACTAATATTTCTGGAAG |
| | | | | GATGTTCGGTTTGGTAGTGTTTCCGAACAGGTGTAGGCTGCTTCTG |
| | | | | AGTGGGCAGAGTACGTAATCTCATCACCTACTCCTTGGGGAGGGTT |
| | | | | TGACTTGATTTTGAGTCAAGGGTATAAGTCTTGCAATTGTAGTTTGC |
| | | | | GTTAGGCAGTGGTCAATGATTTATTACTAACTTAGCGTTATATTTTCC |
| | | | | AGCTACAAGTGCTATAAGTTAATGATTTAGTACTAACACAGAATGTA |
| | | | | GTTCATTTATGCATCAACGTAATTATTTTCCACACTAAATTTTTGTGT |
| | | | | GTGAGATGACAATACCGGATGATGAAACTTTTTATACTAAGCAAAG |
| | | | | TGAGTTTCTTGTTTGATCGAATGACTATGATTTATATATCACTTCCCA |
| | | | | AATAGAACGCAATTAGGTGGTTTTAAGATTGGAGTAGAGCAGACCA |
| | | | | TCTTCAAGAACTAGTCCAGAGCGAGTTGGATACTGGGAGTATACAT |
| | | | | CTTTTGGGGTACAGTTTTGATGGCGTTTATTAATATTAATTTCAACAA |
| | | | | ACCATTTTACATGCTAAAAATAGTGGAGTACCTCAAGTTAAAACAGC |
| | | | | TCAAACAGGTTAAAATACATCTAAGTTTAAGGCACAAAACTGTCTAA |
| | | | | AAACTGTAAACATCTGTATTGCTCTAAAAAAAACTCCGATTTAAGGC |
| | | | | ACTTGTGGCACTGCTGTAGTTTCAAACGATTTCCTCCTAACAAGTAA |
| | | | | GCACGTAATATTTGAAGAACGAGTGCTCATGTTTTCAGGACTGCAT |
| | | | | AACACAAAGTCGGGCCTGTGGAGTGCTAAGTGGAGGCGATCTTCG |
| | | | | CCCATAACCATTGCAGTTGCATCAAGCAAAACATGCCATTGGTTTCT |
| | | | | ATGGGCTTCGGACACCCAATGCATTGAGTAGTGGGTCCCATTTACA |
| | | | | TTCGCAGGATAAGAGAACAAGCCTTTTGGGCTTTGCTTACTTTTCCT |
| | | | | TCTAAAATATTGACTGAGTTGTGAACCTTTGATCCTCAGATCTAACC |
| | | | | ATGTCTCGGGTGCTGATATCACTTTTGCGTCCTTGTAACCTGCAAAC |
| | | | | GCTTTTATGTAGTCATGTTCTTCGTTTATGATTGTCATGTAGTAATTA |
| | | | | CCCCTGAAAAATGGGTAACTTTCACCCACCAACATCATGGCATCACG |
| | | | | ATAGCTTGAGGTGAATAAAACAAGATACTCTTCATCAGGCAACCCA |
| | | | | CACTGCTTCAAAACTTTGTTTCTTGCTTGAATTTCAGGTATTGAGATG |
| | | | | AAGCTTCCAAGATATGATGACTTTTTAGTAAGGATATCCAGTAATCT |
| | | | | TGATGGCTCGAGCTGAATTCTTACCAGATCATGGA |
| 32 | Conyza | gDNA | 5989 | CACAAAATTAAAATTTAGAAGTACTGGATGTTCAAAGTTAACAAAC |
| | canadensis | Contig | | AAGATAAAAATAATATGTGACTTGATAAACCATATATTGTTGTCTAT |
| | | | | CGAGGGTGATCGACCTGCATCTTCATATCCCTAGTGTTGTGTCTCGA |
| | | | | CTTTTTGCATGTGTCATCATTGTCAAGAACCAATTCTATTGTATCATA |
| | | | | ACGTTTACACTAGCTAATCAACCCAGGTTCTACCTGAGCATTTTATTA |
| | | | | AAATTTTAAAAGCAAAAAAAATTTTAAAAAGTGTATATAATTTTTGT |
| | | | | TATTGATATATTATAACTCGGTTTTGAGATATTAAATTAATTAACATG |
| | | | | ATAATTTATATATATTAGTATATATTGCATTAACAAAACATAAAAAG |
| | | | | ACATTTTATAATATTATATTAAAAAAAATTTACTTTGATTCGAATAAA |
| | | | | AGAATAAATTTGTAGACATCATAAATAAAAGAAAACATTTTGAAAA |
| | | | | TATTTAATGGGCTATTTATCTTTAAAAAGATTTTTGATTAAATATGAC |
| | | | | ATCATAAATAAATAAAACATTTTAAAGAAATTTGTAAACATGACACA |
| | | | | TCATAATTGTTTTTAAAAATAATTTAAAAAGAATCCTTCTTTATTATA |
| | | | | TATAAAGATTACATATTAAATATATGTTGTTTCAATCTTACCTTTCTTT |
| | | | | TTAAATAAACTTAGCTAACTTTGATAGTTTGTTTTTTATTTTTTTTATT |
| | | | | TTTAAACAACAGATTGATTTTATTAATAGTTGGTTGAAAATTGATCA |
| | | | | ACCAATAAAAAGAAAAAATTAAATACAAAGAAGAGGACTTTTCAAC |
| | | | | CATTCATCCCAAGATATTTGCTTCTTTTTATAGCGATACCATAAAAAT |
| | | | | GAATGAGTTATAATCGAATCAACAAGAACATCATGTCTTTTATTGGA |
| | | | | GCAACCGAAGACTTTATAACTTTGATAGTTGAGTTGCGAAAATTTAT |
| | | | | TTAAAGTTCGACTGGGATATTTCTAATCTACTAGCTACAAACACTTG |
| | | | | AGCTAAAATTGAACCTTGAACATGGTAAGTAAATCATTTTGGAGAG |
| | | | | ATTTCATGCTTTCTCTGTATCTTAATTCTATTTGTCTAATTGGTTTGGT |
| | | | | CGCAACCCGAAACATGGTTAGAATTACATAAAAAACACAACGAAGT |
| | | | | GAAATCCGGTAGCTCGACCTTCGTTCGTTGGGAGTTTTTCCTCGTGT |
| | | | | CTTGGGTCACTGTAATTGGCACGAGGTTTTTTCACTCCTTTTGTAGTT |
| | | | | CTTACAGTTAATATTTCAGAAAGAGTCTAAATTTATTGTATTGCTTTT |
| | | | | TTTAGATTGTAATTATAATTATACCCTATTACAACTAGTGCCTTGCTA |
| | | | | GTTGTTTATTTTAAATAATATTTTCTGTCGTTCTAGGAAAAAAAAAAT |
| | | | | TGAACCTTGAACACTTAATGCGGAAGTAGTTAATACTTGCAAACTTA |
| | | | | AGGAATAAGTTAAGTAGGCTTTGATGCTATAGATAGTCCTAAGCCA |
| | | | | TCACTCTTCAAAACACAATTTACACAATATTTCTAGAAAAATCAAAA |
| | | | | CTTCCATAGATATGTGAAAATAATAAATGGATGTATATACAAAAAA |
| | | | | AAAACATAATAAAAAATTGAAAAACTTATACACGCGTACAAGCCAA |
| | | | | TGATTATAGTCTAACTGGTTAGAGACATTTTAGGTTTATCTAAAGTT |
| | | | | TTGAGTCGATCTTTAGGAATGATAAGTTTAGGTTTTTTTTTTCTCTGA |
| | | | | ATATTTATAACGGTCCATGGTCAACATTTTGTTTTCTAATATACGTGC |
| | | | | AAGACTTACCATTATATGGTGATGTTTCTCTAATGTCACATACCGAC |
| | | | | CAAATGTTTGTACAAAAATAAAAATAAATACGTGTATAAAAGTCGG |
| | | | | CAAACGAAAATTAAAAAAACAGGATCTCATACATTCACTTCCACACA |
| | | | | CACTCCTCCTAGCTCTCATTTTTTATTTCCTTTTTCATCCCCAGCAAAA |
| | | | | ACACGCACACATAAATTAAATTCAAACGAATCAAACCCTAAAAACA |
| | | | | ACCAAAAAAAAATAATACAATCTCACACACACATTTTCAAACATGGC |
| | | | | GGCCGTAACTTCACCAAACCCACCTTTCACCACCACCACCACAAAAC |
| | | | | CACCGCATTCCGCCACCACATTTCACCGTCCCACCACCACTCATTTAT |
| | | | | CCTTCCCAACCCCACCAAAACGAAACCGTTTCCTTCACATCACCAAC |
| | | | | GTCCTCTCGGACCACAAACCCATCACTACCACCACTACAACCACCGT |
| | | | | TCCACCACCTTCATTCACTTCCCGTTTCGCCGCCGACCAACCCCGGA |
| | | | | AGGGCTCCGACGTTCTCGTAGAAGCCCTCGAACGTGAAGGCGTCAC |
| | | | | CGACGTCTTCGCTTACCCTGGTGGCGCGTCAATGGAGATCCACCAA |
| | | | | GCTCTCACGCGCTCCACCACCATCCGCAACGTCCTCCCCCGCCATGA |
| | | | | ACAAGGTGGCATCTTCGCCGCAGAAGGCTACGCACGTGCCTCCGGT |
| | | | | CTCCCCGGCGTCTGTATAGCCACTTCCGGTCCCGGCGCCACAAACCT |
| | | | | TGTCTCCGGCCTTGCTGACGCGCTTCTTGACAGTGTCCCCGTCGTTG |
| | | | | CCATCACCGGCCAAGTTCCCCGGCGAATGATCGGAACTGATGCTTTT |
| | | | | CAAGAAACACCCATTGTTGAGGTAACAAGATCCATTACTAAACATA |
| | | | | ACTATTTGGTTTTAGATGTTGATGATATTCCAAGAATTGTTAGAGAA |
| | | | | GCTTTTTATCTTGCCCGGTCGGGTCGACCCGGACCCGTTTTGATTGA |
| | | | | TATTCCAAAAGATATACAACAACAGTTATGTGTGCCTAAATGGGAT |
| | | | | GAGCCCATGAGGCTTCCTGGTTATTTATCTAGGTTACCTAAGCCACC |
| | | | | TAATGATGGTTTACTAGAACAAATTGTGAGGTTAGTTGGAGAGTCG |
| | | | | AAAAGGCCGGTTTTGTATGTAGGTGGTGGTTGTTTGAATTCGAGTG |
| | | | | ATGAGTTGAGACGGTTTGTTGAGCTTACGGGTATTCCGGTAGCTAG |
| | | | | TACTTTAATGGGTCTTGGGTCTTATCCAGCTTCGAGTGATTTGTCTCT |
| | | | | TCAAATGCTTGGAATGCATGGAACTGTTTATGCGAATTATGCTGTTG |
| | | | | ATAAGGCGGATTTGTTGCTTGCGTTTGGGGTTAGGTTTGATGACCG |
| | | | | TGTGACTGGAAAGCTTGAAGCTTTTGCTAGTAGAGCTAAGATTGTT |
| | | | | CATATTGATATTGACTCTGCTGAGATTGGGAAGAATAAGCAGCCAC |
| | | | | ATGTGTCGGTTTGTGGTGATATTAAGATTGCGTTACAGGGTCTTAAC |
| | | | | AAGATTTTAGAAGGGAGGCGTGAGATGAGTAATCTTGATTTTTCGG |
| | | | | CGTGGAGGGCAGAGTTGGATGAACAAAAGGTGAACCATCCGTTGA |
| | | | | GTTTTAAAACGTTCGGTGAAGCTATTCCACCGCAATATGCTATTCAG |
| | | | | GTGCTTGATGAGTTAACGGGTGGGAATGCTATTATAAGTACTGGGG |
| | | | | TCGGGCAACATCAGATGTGGGCTGCTCAGTTTTACAAGTACAACAG |
| | | | | ACCTAGACAGTGGTTGACTTCAGGTGGACTAGGGGCTATGGGCTTT |
| | | | | GGACTGCCTGCAGCCATTGGTGCAGCCGTTGCAAGACCTGATGCAG |
| | | | | TGGTAGTGGATATCGATGGTGATGGAAGTTTTATCATGAATGTTCA |
| | | | | AGAGTTGGCTACTATCCGAGTGGAAAATCTTCCTGTCAAGGTTTTGT |
| | | | | TACTCAATAATCAGCATTTGGGTATGGTGGTTCAATGGGAGGATCG |
| | | | | TTTCTACAAGGCAAATAGGGCGCATACCTACTTGGGGAACCCATCA |
| | | | | AAGGAGGCTGAAATATTTCCAAACATGTTGAAGTTTGCCGAAGCGT |
| | | | | GTGATATACCAGCTGCACGAGTGACCCGTAAAGCTGATCTACGGGC |
| | | | | GGCTATTCAGAAGATGTTGGATACTCCTGGGCCTTACTTGTTGGAT |
| | | | | GTCATTGTGCCGCATCAAGAACATGTTTTGCCGATGATTCCTGCTGG |
| | | | | TGGGGGCTTCATGGATGTGATCACCGAGGGTGATGGTAGAACGAA |
| | | | | GTATTGAGCTTCAAAGTCACAACTTAGTTTCAAGTTTCAACCACTGT |
| | | | | ATGTAAACATCTAGCATCTTTACTTAAGAGGTGTGAGCAGTTTGTTG |
| | | | | GATTTGAAGTTAATTTCTTGTTGTGTATTTTAGTTTCTGGTTTTTTGA |
| | | | | ATGTTCCGTAGTAGTGTATTGACTGTTCTTTTAGTAGCCTCATGAAT |
| | | | | AAATGTCTTTTTTTCCTTGCCTGCGTAGTTTTGTAGAAGTAATCTTCT |
| | | | | GTTTCTATGTTTATAGCAAGGACCAAAAGAAGAGTATTAGAGCCCC |
| | | | | TGGTCTAAAAGTCGGATATCTGAAGTCAAATTTTAGCCCCTATTAAG |
| | | | | ATATGTCTCTTTTTGATTGTGGTCAATACTAGCTGTAAGATACCATTT |
| | | | | GAGATCAGCAATTACCCGTTGCGGTTTCATTTTGGTTTGGTCTGGTC |
| | | | | TGGTCTGGTCTGGTCTATTTCTTGTTGTGTAGTTTCTGCTATTTGTGG |
| | | | | GCTATATGTTCTGGTTTTCTTGGGTTACTGTGTTTGGGCTTAGTATTA |
| | | | | CAATCTATTAGTTTTGAAGTTGGTTCATATTTAGTAAACTATAAATTT |
| | | | | TCAAAAACTATTCTTGATCGGTCCAGCATCAGTATATACTGGTTCAG |
| | | | | AAACTTGATAGATGTTGCTCAATCTTTCCGTCCTGAATGGGGCATTG |
| | | | | ATTGTTAGGATGTTTTTGTATAGGGTGACTAATATTTCTGGAAGGAT |
| | | | | GTTCGGTTTGGTAGTGTTTCCGAACAGGTGTAGGCTGCTTCTGAGT |
| | | | | GGGCAGAGTACGTAATCTCATCACCTACTCCTTGGGGAGGGTTTGA |
| | | | | CTTGATTTTGAGTCAAGGGTATAAGTCTTGCAATTGTAGTTTGCGTT |
| | | | | AGGCAGTGGTCAATGATTTATTACTAACTTAGCGTTATATTTTCCAG |
| | | | | CTACAAGTGCTATAAGTTAATGATTTAGTACTAACACAGAATGTAGT |
| | | | | TCATTTATGCATCAACGTAATTATTTTCCACACTAAATTTTTGTGTGT |
| | | | | GAGATGACAATACCGGATGATGAAACTTTTTATACTAAGCAAAGTG |
| | | | | AGTTTCTTGTTTGATCGAATGACTATGATTTATATATCACTTCCCAAA |
| | | | | TAGAACGCAATTAGGTGGTTTTAAGATTGGAGTAGAGCAGACCATC |
| | | | | TTCAAGAACTAGTCCAGAGCGAGTTGGATACTGGGAGTATACATCT |
| | | | | TTTGGGGTACAGTTTTGATGGCGTTTATTAATATTAATTTCAACAAA |
| | | | | CCATTTTACATGCTAAAAATAGTGGAGTACCTCAAGTTAAAACAGCT |
| | | | | CAAACAGGTTAAAATACATCTAAGTTTAAGGCACAAAACTGTCTAA |
| | | | | AAACTGTAAACATCTGTATTGCTCTAAAAAAAACTCCGATTTAAGGC |
| | | | | ACTTGTGGCACTGCTGTAGTTTCAAACGATTTCCTCCTAACAAGTAA |
| | | | | GCACGTAATATTTGAAGAACGAGTGCTCATGTTTTCAGGACTGCAT |
| | | | | AACACAAAGTCGGGCCTGTGGAGTGCTAAGTGGAGGCGATCTTCG |
| | | | | CCCATAACCATTGCAGTTGCATCAAGCAAAACATGCCATTGGTTTCT |
| | | | | ATGGGCTTCGGACACCCAATGCATTGAGTAGTGGGTCCCATTTACA |
| | | | | TTCGCAGGATAAGAGAACAAGCCTTTTGGGCTTTGCTTACTTTTCCT |
| | | | | TCTAAAATATTGACTGAGTTGTGAACCTTTGATCCTCAGATCTAACC |
| | | | | ATGTCTCGGGTGCTGATATCACTTTTGCGTCCTTGTAACCTGCAAAC |
| | | | | GCTTTTATGTAGTCATGTTCTTCGTTTATGATTGTCATGTAGTAATTA |
| | | | | CCCCTGAAAAATGGGTAACTTTCACCCACCAACATCATGGCATCACG |
| | | | | ATAGCTTGAGGTGAATAAAACAAGATACTCTTCATCAGGCAACCCA |
| | | | | CACCGCTTCAAAACTTTGTTTCTTGCTTGAATTTCAGGTATTGAGAT |
| | | | | GAAGCTTCCAAGATATGATGACTTTTTAGTAAGGATATCCAGTAATC |
| | | | | TTGATGGCTCGAGCTGAATTCTTACCAGATCATGGA |
| 33 | Euphorbia | cDNA | 2053 | CAATCCACCACCCCCCGCCGCTCTCTCCAAATCTCCAACTCCACTCCC |
| | heterophylla | Contig | | AAACCCACAATCCCCGCCCCCTCCGTCCCCTCCGCCCCCCAAACCCCT |
| | | | | CCCCCGCGGTTCGCCCCCGACGAGCCCCGCAAGGGCGCCGACATTC |
| | | | | TCGTCGAGGCCCTGGAGCGCCAGGGCGTCACCGACGTGTTCGCCTA |
| | | | | CCCCGGCGGCGCCTCAATGGAGATCCACCAAGCCCTAACCCGCTCC |
| | | | | CCAACCATCCGCAACGTCCTCCCCCGCCACGAGCAGGGCGGCGTCT |
| | | | | TCGCCGCTGAAGGATACGCCCGCGCCTCCGGCAAGCCCGGCGTGTG |
| | | | | CATCGCGACCTCCGGCCCAGGCGCCACCAATCTCGTCAGCGGCCTC |
| | | | | GCCGATGCGCTCCTCGACAGCGTCCCCATTGTGGCCATCACCGGCC |
| | | | | AGGTGCCTCGCCGGATGATCGGAACCGACGCCTTCCAGGAAACTCC |
| | | | | GATTGTTGAGGTAACTCGATCCATAACGAAGCACAATTATTTGGTAC |
| | | | | TTGATATTGAGGATATCCCTAGGATTGTGAGTGAGGCTTTTTTCTTG |
| | | | | GCGTCCTCTGGTCGTCCTGGTCCAGTTTTAATCGATGTGCCTAAGGA |
| | | | | TATACAGCAGCAATTAGCTGTTCCTAATTGGAATGTATCCATGAAAT |
| | | | | TGCCTGGTTATCTATCTAGGTTACCGAAAGACCCTAGCGAATTGCAA |
| | | | | TTAGAGCAGATTGTGAGGCTAATTTCCGAGTCTAAGAAACCAGTTTT |
| | | | | GTACGTTGGAGGTGGGTGTTTGAATTCCAGTGAGGAATTGAGGAA |
| | | | | ATTTGTTGAATTAACCGGGATTCCAGTTGCTAGTACTTTGATGGGTT |
| | | | | TAGGATCTTTCCCACTTAACCATGACTTATCCCTGTCAATGCTCGGA |
| | | | | ATGCATGGAACTGTTTATGCCAATTATGCAGTGGACAAAAGTGATC |
| | | | | TTTTACTTGCATTTGGAGTACGATTCGATGATCGTGTGACTGGAAAG |
| | | | | CTCGAAGCTTTTGCAAGCCGGGCTAAAATAGTTCACATCGACATCG |
| | | | | ATTCGGCGGAAATCGGGAAAAACAAGCAGCCCCATGTGTCTATATG |
| | | | | TGGAGATGTTAAATTAGCCTTGCAGGGAGTCAACAAAATTCTGGAG |
| | | | | AGCAAAAGCTTCAAGAGTAAGTTAGATTTCGGGAAATGGAGAGAC |
| | | | | GAGTTAAATGACCAAAAAGTTAAATATCCATTGAATTTCAAGACTTT |
| | | | | TGATGAAGCAATTCCTCCTCAGTATGCCATACAAGTTCTCGACGAAT |
| | | | | TAACCGATGGAAATGCCATAATAAGTACAGGAGTCGGACAACATCA |
| | | | | AATGTGGTCGGCCCAATTTTACAAGTACAAAAAGCCGAGGCAATGG |
| | | | | CTAACTTCCGGAGGGTTAGGTGCTATGGGTTTCGGACTTCCGGCAG |
| | | | | CAATAGGTGCTTCGGTTGCTAACCCTAATGCCGTTGTGGTTGATATC |
| | | | | GATGGGGATGGGAGTTTCATAATGAATGTCCAGGAGTTAGCCACG |
| | | | | ATCCGAGTCGAAAATCTACCAATCAAAATATTGCTTCTGAATAACCA |
| | | | | GCATTTGGGTATGGTTGTACAATGGGAAGACCGTTTTTACAAGGCG |
| | | | | AATCGAGCTCATACTTATTTGGGGGACCCATCGAAAGAGTCGGAGA |
| | | | | TTTTCCCCAATATGTTGAAGTTTGCTGAAGCTTGTGGAATTCCTGCT |
| | | | | GCTCGAGTGTCGAGAAAACAGGATATAAGAGGGGCAATTCAGACA |
| | | | | ATGTTGGATACTCCTGGTCCGTACCTTTTGGATGTGATTGTGCCACA |
| | | | | TCAAGAACATGTGTTGCCTATGATCCCAAGTGGCGGCGGGTTTAAG |
| | | | | GATATAATAACGGAGGGTGATGGGAGATTCAAGTACTAGTCTTAGT |
| | | | | CTTGTTGAGGTAATAAAATGTATGTTTTTTGTGTAAGTTGATGCTTT |
| | | | | GGTATTAGGTGTGGTTGGTCTTTTGGTTTATGGTTATGTGTTTAATG |
| | | | | TTGTTGTTGGTTTGTGTTTGGACTTGAAACGTGTTGCATTTGCTATG |
| | | | | TTCTTGTTAGCTTGGCAAATGATTAAAGTTATCTGTAATTGTTCTTGT |
| | | | | ACTTCTAGG |
| 34 | Euphorbia | gDNA | 4912 | TTCAGTTTAGTTCAATTCAGCAAGTTGCAGTTCAAAAGAACAGAGCC |
| | heterophylla | Contig | | TTAATGTCCAATATTGAATTGTTTGAAATGTACTATTACCATATGTTT |
| | | | | TAAAAAGTGTTGTCAGTCAGATAGTCGAGACTTCGAAATAATTACA |
| | | | | ATGGACTTGGACGGAATCTAGATGGGAGTTAAATAAATTTATATTTT |
| | | | | TTAAATATTATTTAATATATAAAAAATATAAATTTAATTAAAAATAAA |
| | | | | TTATAATAAAATAAAAAAAATAATTTAAATTTTTAAAATAACATTCTA |
| | | | | AAAAGTCCACTAAACGATATTATAAAAATTTCGACTTAAATACCTTT |
| | | | | TTGGGTTCTGTTCTATACACCAAATGCCCTTTTGGTGTCTGACCTATT |
| | | | | GAGATCGCCTTTTTTTATGTCTGACGTATTCAATATTTGCTTATTTGG |
| | | | | TACATTTCATATTCAATTTCAGTATGATAACTTAATCGACTAAAAAG |
| | | | | AGTCAACAATTTATGCATGATCAACAAAATATATTCATGTGTTCAAA |
| | | | | CCATATTATATGCATTTCATATTCTTTGTGTTGTTAGATGGATGCTCG |
| | | | | ATGTACTAAAATAATATAGATCAAACACTAAATAGGCTAATGTTGAA |
| | | | | TACATCAGGCACCAACTAGGCAAAAAGTGAATACATCACGCACCAA |
| | | | | ACAGACAATTTCAATAGGTCAAACACCAAAAAAGTATTTAATATATA |
| | | | | AAACAGGACCTAAAAAAATATTCAATTATACAAAATTTCCTACTATT |
| | | | | TAAGATCACAACAACATTCTAAAAAATTCTACGTAACCGCGAGCTAG |
| | | | | CTCGAGTTATAAAACACTTTGTGTTTAGTAAATAGTGAAGGTCATAA |
| | | | | AGGTAATTTGGGGTGGACCTTCAAATTTTAAAAGGGAATCGAGGGC |
| | | | | CACATATCACACTCCCTCTTCCGCCACAAAACCTGCAACTCTCTCCTT |
| | | | | CTACTCTCCACAATGGCGGCGGCGGCGCCTTCCTCTGCAGCCACCAC |
| | | | | CATCTCCAAACCCTCCGCCGTCAGATCCTCAATCTCCGCCTCCCGATT |
| | | | | CTCCCTCCCGTTCCCCATCAAACCCCAATCCACCACCCCCCGCCGCTC |
| | | | | TCTCCAAATCTCCAACTCCACTCCCAAACCCACAATCCCCGCTCCCTC |
| | | | | CGTCCCCTCCGCCCCCCAAACCCCTCCCCCGCGGTTCGCCCCCGACG |
| | | | | AGCCCCGCAAGGGCGCCGACATTCTCGTCGAGGCCCTGGAGCGCC |
| | | | | AGGGCGTCACCGACGTGTTCGCCTACCCCGGCGGCGCCTCAATGGA |
| | | | | GATCCACCAAGCCCTAACCCGCTCCCCAACCATCCGCAACGTCCTCC |
| | | | | CCCGCCACGAGCAGGGCGGCGTCTTCGCCGCTGAAGGATACGCCC |
| | | | | GCGCCTCCGGCAAGCCCGGCGTGTGCATCGCGACCTCCGGCCCAGG |
| | | | | CGCCACCAATCTCGTCAGCGGCCTCGCCGATGCGCTCCTCGACAGC |
| | | | | GTCCCCATTGTGGCCATCACCGGCCAGGTGCCTCGCCGGATGATCG |
| | | | | GAACCGACGCCTTCCAGGAAACTCCGATTGTTGAGGTAACTCGATC |
| | | | | CATAACGAAGCACAATTATTTGGTACTTGATATTGAGGATATCCCTA |
| | | | | GGATTGTGAGTGAGGCTTTTTTCTTGGCGTCCTCTGGTCGTCCTGGT |
| | | | | CCAGTTTTAATCGATGTGCCTAAGGATATACAGCAGCAATTAGCTGT |
| | | | | TCCTAATTGGAATGTATCCATGAAATTGCCTGGTTATCTATCTAGGT |
| | | | | TACCGAAAGACCCTAGCGAATTGCAATTAGAGCAGATTGTGAGGCT |
| | | | | AATTTCCGAGTCTAAGAAACCAGTTTTGTACGTTGGAGGTGGGTGT |
| | | | | TTGAATTCCAGTGAGGAATTGAGGAAATTTGTTGAATTAACCGGGA |
| | | | | TTCCAGTAGCTAGTACTTTGATGGGTTTAGGATCTTTTCCACTTAACC |
| | | | | ATGACTTATCCCTGTCAATGCTCGGAATGCATGGAACTGTTTATGCC |
| | | | | AATTATGCAGTGGACAAAAGTGATCTTTTACTTGCATTTGGAGTACG |
| | | | | ATTCGATGATCGTGTGACTGGAAAGCTCGAAGCTTTTGCAAGCCGG |
| | | | | GCTAAAATAGTTCACATCGACATCGATTCGGCGGAAATCGGGAAAA |
| | | | | ACAAGCAGCCCCATGTGTCTATATGTGGAGATGTTAAATTAGCCTTG |
| | | | | CAGGGAGTCAACAAAATTCTGGAGAGCAAAAGCTTCAAGAGTAAG |
| | | | | TTAGATTTCGGGAAATGGAGGGACGAGTTAAATGACCAAAAAGTT |
| | | | | AAATATCCATTGAATTTCAAGACTTTTGATGAAGCAATTCCTCCTCA |
| | | | | GTATGCCATACAAGTTCTCGACGAATTAACCGATGGAAATGCGATA |
| | | | | ATAAGTACAGGAGTCGGACAACATCAAATGTGGTCGGCCCAATTTT |
| | | | | ACAAGTACAAAAAGCCGAGGCAATGGCTAACTTCCGGAGGGTTAG |
| | | | | GTGCTATGGGTTTCGGACTTCCGGCAGCAATAGGTGCTTCGGTTGC |
| | | | | TAACCCTAATGCCGTTGTGGTTGATATCGATGGGGATGGGAGTTTC |
| | | | | ATAATGAATGTCCAGGAGTTAGCCACGATTCGAGTGGAAAATCTAC |
| | | | | CGATCAAAATATTGCTTCTGAATAACCAGCATTTGGGTATGGTTGTA |
| | | | | CAATGGGAAGACCGATTTTACAAGGCGAATCGAGCTCATACTTATT |
| | | | | TGGGGGACCCATCGAAAGAGTCGGAGATTTTCCCCAATATGTTGAA |
| | | | | GTTTGCTGAAGCTTGTGGAATTCCTGCTGCTCGAGTGTCGAGAAAA |
| | | | | CAGGATATAAGAGGGGCAATTCAGACAATGTTGGATACTCCTGGTC |
| | | | | CGTACCTTTTGGATGTGATTGTGCCACATCAAGAACATGTGTTGCCT |
| | | | | ATGATCCCAAGTGGCGGCGGGTTTAAGGATATAATAACCGAGGGT |
| | | | | GATGGGAGATTCAAGTACTAGTCTTAGTCTTGTTGAGGTAATAAAA |
| | | | | TGTATGTTTTTTGTGTAAGTTGATGCTTTGGTATTAGGTGTGGTTGG |
| | | | | TCTTTTGGTTAATGGTTATGTGTTTAATGTTGTTGTTGGTTTGTGTTT |
| | | | | GGACTTGAAACGTGTTGCATTTGCTATGTTCTTGTTAGCTTGGCAAA |
| | | | | TGATTAAAGTTATCTGTAATTGTTCTTGTACTTTTAGGTAATAATATG |
| | | | | CTTCCTAGATGAGGTTTTGAAGAGGTTTTGCTCTTGTTTTCTTTCACT |
| | | | | AATTTTTTGTTAGTGAAGTAGAAAATTCTCCAAAGAGGGCAAAGTA |
| | | | | TAAGAAAAAAACCAATATATAATATTGTAGATCTATAGTTGATTATA |
| | | | | GATGAAATAAGTTATCCTAAACTTCTAGGAGCTAAATAGAACTTATT |
| | | | | GGAGCAGGACTAAACTAAATATATGAGATATGAATTGAACTGACTG |
| | | | | AAATTTAAGAATAGAATTCCAAGAGGACAAGACCAAAACAGAAGA |
| | | | | TTGTAGTAATTGAGTCCATGAAAAAAGATTTGATTTCAAAAGGGCC |
| | | | | TCATCGTAAAATAATTGTTCATAATAGCAATTAGTCAATTATTCATCA |
| | | | | GTGGGTTCGTTTAAGATTCTTAATCTTAATTTCTCAAATGAAATCCTA |
| | | | | GAAAGTTTCCAACTTTACTAGGAAAAGAGCAATATTATTGACTAAA |
| | | | | AATGAATTAAATGTTTGGTCCACAAAAGTTTGGAATTTTCATGTTTTT |
| | | | | GCCAGATTGCCATCAAGTGGAAAACATGTCTGCAGTTGGATAAGAA |
| | | | | ATGGAAAATCTATGTGAAGTTGTGCAAAGGAAGGCCATACAATTAT |
| | | | | TTTGGCAGATAATGTAAAGCCAAAATACAATATGCACTGCTTTTAAA |
| | | | | AGTTTATGTGCAACAGTTTGAATAGTTAGTTCAGACTTTTAGCAGTA |
| | | | | TTATAAATGGTTAGGTCATATTTTCGGAGACTACAATTCAGCTCAGT |
| | | | | TTGGAGTAAAATTCAATTCAGTTGTATGTATTTATCGATTTACATTCA |
| | | | | AATAAGGCCTTGTTTAGTTTGGGTCATATTAATTTAGTTCAACCAAC |
| | | | | TTTAATTTTATTTACTTTAGTTTTAAAAAATATAAAATAACATGACTT |
| | | | | TTGTTATACAAATGTAACTTCAACTCAAAAACACAACAAAAGAGTTT |
| | | | | TCTATATCAATGTAATTTTGGGGTATTTATCTTGGCTTAAAAAGTTTC |
| | | | | TTATAATAACTTTTTAACTTATAAAAAGTAAAAGAAGTGTTTCTTTCA |
| | | | | GCTGATTTTTAATTTAAAAGTAAAAATATAGAAGTAAGGATTTGTTA |
| | | | | CTTTTCTACTTTTGCTTTTCTTTAAGACAAAAGCTATAAGCTAAGAGA |
| | | | | AACACCCCTTTATCAACATTGGAAGTTGTTTACGGGCTAGGTAGCAC |
| | | | | AAAATTGGAAACTGAAACGGAAATGAGAAAACCCATTTTCAAAACG |
| | | | | TATAGGTTTGGATACCGTAAGGAAACGTGTAAATAATAAAAAATGT |
| | | | | ATGGATATATTTATAAATATAAAATTTTTTATGCATATAATTTCATTT |
| | | | | TTTCATAAAATATTAAAATATTATTTAAAATATATTCATTAATTACTA |
| | | | | AAGACATCTCCAACCCTCGCTATCTCTTTTTCCCCTAAAACTTTTTACT |
| | | | | CTCCAACTCTACCTTTTAAATTTTTAGTTCAAAACACATATATTATTG |
| | | | | ATTTATTCTTACATATCTAACTTTTTATTATCATTTTATTCCTCCTTTCC |
| | | | | TATCTAACTCAAACAAGCATAAACTCAATTAAATAATAAATAAAAGA |
| | | | | AAAGGCAAAAAAAATTAAGGGATGAACAATGCTGTTTTAGAGCAAC |
| | | | | ATCCTCTCAAATTTGAGGCAAAGAATGAAGCTCCATTATTCATCTAC |
| | | | | AACCCTAAAATAGGGTTAGGTTGGAGATGGCGTAAACAATTTTATT |
| | | | | TCATGCTTTCCCTTGGTTGTATGGTTCGTCCGAGGGAGAAATCGTAA |
| | | | | ATTCATCAATATCAAGTTCTTAAAAAGAACACAATTTCAAC |
| 35 | Euphorbia | gDNA | 3185 | CGTCGAGGCCCTGGAGCGCCAGGGCGTCACCGACGTGTTCGCCTAC |
| | heterophylla | Contig | | CCCGGCGGCGCCTCAATGGAGATCCACCAAGCCCTAACCCGCTCCC |
| | | | | CAACCATCCGCAACGTCCTCCCCCGCCACGAGCAGGGCGGCGTCTT |
| | | | | CGCCGCTGAAGGATACGCCCGCGCCTCCGGCAAGCCCGGCGTGTG |
| | | | | CATCGCGACCTCCGGCCCAGGCGCCACCAATCTCGTCAGCGGCCTC |
| | | | | GCCGATGCGCTCCTCGACAGCGTCCCCATTGTGGCCATCACCGGCC |
| | | | | AGGTGCCTCGCCGGATGATCGGAACCGACGCCTTCCAGGAAACTCC |
| | | | | GATTGTTGAGGTAACTCGATCCATAACGAAGCACAATTATTTGGTAC |
| | | | | TTGATATTGAGGATATCCCTAGGATTGTGAGTGAGGCTTTTTTCTTG |
| | | | | GCGTCCTCTGGTCGTCCTGGTCCAGTTTTAATCGATGTGCCTAAGGA |
| | | | | TATACAGCAGCAATTAGCTGTTCCTAATTGGAATGTATCCATGAAAT |
| | | | | TGCCTGGTTATCTATCTAGGTTACCGAAAGACCCTAGCGAATTGCAA |
| | | | | TTAGAGCAGATTGTGAGGCTAATTTCCGAGTCTAAGAAACCAGTTTT |
| | | | | GTACGTTGGAGGTGGGTGTTTGAATTCCAGTGAGGAATTGAGGAA |
| | | | | ATTTGTTGAATTAACCGGGATTCCAGTTGCTAGTACTTTGATGGGTT |
| | | | | TAGGATCTTTCCCACTTAACCATGACTTATCCCTGTCAATGCTCGGA |
| | | | | ATGCATGGAACTGTTTATGCCAATTATGCAGTGGACAAAAGTGATC |
| | | | | TTTTACTTGCATTTGGAGTACGATTCGATGATCGTGTGACTGGAAAG |
| | | | | CTCGAAGCTTTTGCAAGCCGGGCTAAAATAGTTCACATCGACATCG |
| | | | | ATTCGGCGGAAATCGGGAAAAACAAGCAGCCCCATGTGTCTATATG |
| | | | | TGGAGATGTTAAATTAGCCTTGCAGGGAGTCAACAAAATTCTGGAG |
| | | | | AGCAAAAGCTTCAAGAGTAAGTTAGATTTCGGGAAATGGAGAGAC |
| | | | | GAGTTAAATGACCAAAAAGTTAAATATCCATTGAATTTCAAGACTTT |
| | | | | TGATGAAGCAATTCCTCCTCAGTATGCCATACAAGTTCTCGACGAAT |
| | | | | TAACCGATGGAAATGCCATAATAAGTACAGGAGTCGGACAACATCA |
| | | | | AATGTGGTCGGCCCAATTTTACAAGTACAAAAAGCCGAGGCAATGG |
| | | | | CTAACTTCCGGAGGGTTAGGTGCTATGGGTTTCGGACTTCCGGCAG |
| | | | | CAATAGGTGCTTCGGTTGCTAACCCTAATGCCGTTGTGGTTGATATC |
| | | | | GATGGGGATGGGAGTTTCATAATGAATGTCCAGGAGTTAGCCACG |
| | | | | ATCCGAGTCGAAAATCTACCAATCAAAATATTGCTTCTGAATAACCA |
| | | | | GCATTTGGGTATGGTTGTACAATGGGAAGACCGTTTTTACAAGGCG |
| | | | | AATCGAGCTCATACTTATTTGGGGGACCCATCGAAAGAGTCGGAGA |
| | | | | TTTTCCCCAATATGTTGAAGTTTGCTGAAGCTTGTGGAATTCCTGCT |
| | | | | GCTCGAGTGTCGAGAAAACAGGATATAAGAGGGGCAATTCAGACA |
| | | | | ATGTTGGATACTCCTGGTCCGTACCTTTTGGATGTGATTGTGCCACA |
| | | | | TCAAGAACATGTGTTGCCTATGATCCCAAGTGGCGGCGGGTTTAAG |
| | | | | GATATAATAACTGAGGGTGATGGGAGATTCAAGTACTAGTCTTAGT |
| | | | | CTTGTTGAGGTAATAAAATGTATGTTTTTTGTGTAAGTTGATGCTTT |
| | | | | GGTATTAGGTGTGGTTGGTCTTTTGGTTTATGGTTATGTGTTTAATG |
| | | | | TTGTTGTTGGTTTGTGTTTGGACTTGAAACGTGTTGCATTTGCTATG |
| | | | | TTCTTGTTAGCTTGGCAAATGATTAAAGTTATCTGTAATTGTTCTTGT |
| | | | | ACTTTTAGGTAATAATATGCTTCCTAGAAGAGGTTTTGCTCTTGTTTT |
| | | | | CTTTCACTAATTTTTTGTTAGTGAAGTAGAAAATTCTCCAAAGAGGG |
| | | | | CAAAGTATAAGAAAAAAACCAATATATAATATTGTAGATCTATAGTT |
| | | | | GATTATAGATGAAACAAGTTATCCTAAACTTCTAGGAGCTAAATAG |
| | | | | AACTTATTGGAGCGGGACTAAACTAAATATATTAGATATGAATTGA |
| | | | | ATTGAATTGAAATGACGAAATTTAAGAATAGAATTCCAAGAGGATG |
| | | | | AGGCCAAAACAAAAGATTGTAGTAATTGAGTCCATGAAAAAAGATT |
| | | | | TGATTTCAAAAGGGCCTCATAGTAAAATAATTGTTCATAATAGCAAT |
| | | | | TAGTCAATTATTCATCAGTGGGTTCGTTTAAGATTCTTAATCTTAATT |
| | | | | TCTCAAATGAAATCCTAGAAAGTTTCCAACTTTACTAGGAAAAGAGC |
| | | | | AATATTATTGACTAAAAATGAATTAAATGTTTGGTCCACAAAAGTTT |
| | | | | GGAATTTTCATGTTTTTGCCAGATTGCCATCAAGTGGAAAACATGTC |
| | | | | TGCAGTTGGATAAGAAATGGAAAATCTATGTGAAGTTGTTGTGCAA |
| | | | | AGGAAGGCCATACAATTATTTTGGCAGATAATGTAAAGCCAAAATA |
| | | | | CAATATGCACTGCTTTTAAAAGTTTATGTGCAACAGTTTGAATAGTT |
| | | | | AGTTCAGACTTTTAGCAGTATTATAAATGGTTAGGTCATATTTTCGG |
| | | | | AGACTACAATTCAGTTTAGTTGGGAGTACAATTCAGTTCAGTTGTGT |
| | | | | GTAGTTATCAATTTACATTCAAATATGGCCCTGTTTAGTTCAGGTCAT |
| | | | | TTTAGTTCATCTCAACTAACTTTAATTTAATTTACTTTAGCTTTAAAAA |
| | | | | ATTTAAAATAACATGACCTTTGGTATATAATTGTAACTTCTACTCAAA |
| | | | | AAAACAACAAAAGAGTTTTCTATATCAATGTAATTTCATCAACATCG |
| | | | | GAAGTTTTTTATGGGATAGGTAGCACAAAAATGAAAACTAAAACGA |
| | | | | AATTGGGAAAACCATTTTCAAAAAGTATAAGTTTGGAAATGTGTAA |
| | | | | ATAATAAAAAATATATATGGATATATTTATAAATATAAAATTTTTTAA |
| | | | | GCATATAATTTCATTTTTTGTATAAAATATTAAAGTATTATTTAAAAT |
| | | | | ATATTCATTACTCTCTCCGGTTCCAAATAAAAGACCTTTTGGCCTTTT |
| | | | | TTATTTGGTTCTAAATATTTGATCATTTAGATTATCCATGCAATATTT |
| | | | | ATTATTCTTTCTC |
| 36 | Commelina | cDNA | 363 | CTTTCGTTGAGGATGCTTGGAATGCATGGTACTGTGAGCGCAAATT |
| | diffusa | Contig | | ACTCAGTTGATAAGTCTGATTTGTTGCTTGCTTTTGGGGTTAGGTTT |
| | | | | GATGATAGGGTGACTGGGAAGCTGGAGACATTTGCTAGTAGGGCG |
| | | | | AAGATTGTGCACATTGATATTGATAGGGCTGAGATTGGTAAGAACA |
| | | | | AGCAGCCCCATGTGTCGATTTGTGCTGATATCAAGCTGGCTTTGCAG |
| | | | | GGGATGAATGCGATGTTGGAGGAGAGTGGTGTTTATAAGAAGTTT |
| | | | | GACTTTGGTGCGTGGAGGGAGGAGTTGGATGTGCAGAAGAAGACT |
| | | | | TATCCTTTGAGCTACAAGACATTTGGGGATTTGATTCCTCCG |
| 37 | Digitaria | cDNA | 1868 | CGTTGATAAACTGATCCATAACATTTTTAACCAGGAACGAAATTACA |
| | sanguinalis | Contig | | CAACAAAACATTAACTTCAAAACCGACAAACTGCTTACAGAACACAC |
| | | | | TATATGTGACATTGAAGCTCAATATTTCATTCTGCCGTCGCCTTCGG |
| | | | | TGATCACATCCATGAAACCTCCACCAGCCGGGATCATGGGCAACAC |
| | | | | ATGTTCTTGATGGGGCACGATCACATCCAACAAGTAAGGCCCCGGT |
| | | | | GTATCCAACATCTTCTGAATAGCTGCTCGTAGATCTGCCTTCCGGGT |
| | | | | CACTCGGGCAGCTGGGATATCACACGCTTCAGCAAACTTCAACATG |
| | | | | TTAGGGAATATTTCAGACTCTTTTGACGGATTTCCTAAGTAGGTATG |
| | | | | AGCCCGATTCGCCTTGTAAAACCGATCCTCCCACTGAACCACCATAC |
| | | | | CCAAATGCTGATTGTTAAGTAACAAAATCTTAACAGGAAGATTTTCA |
| | | | | ACACGGATTGTGGCTAACTCTTGAACGTTCATTATAAAGCTTCCATC |
| | | | | ACCATCGATATCAACTACTACCGCATCAGGTCTTGCAACAGCCGCCC |
| | | | | CGATAGCAGCGGGCAACCCAAAACCCATCGCCCCTAGTCCACCTGA |
| | | | | CGTCAGCCATTGTCTAGGCTTGTTGTATTTGTAAAACTGAGCAGCCC |
| | | | | ACATCTGATGCTGCCCGACCCCAGTGCTAATAATCGCATTCCCACCC |
| | | | | GTTAACTCATCAAGCACTTGAATGGCATACTGCGGAGGAATAGCTT |
| | | | | CGCCAAATGTTTTAAAACTCAACGGATACTTAACCTTTTGCTCATCCA |
| | | | | ATTCCTTCCTCCAGTTCGAGAAATCAAGATTAGTCACCGAATTCTTTA |
| | | | | CCTCCAAAATCTTGTTCAGACCCTGTAACGCGACCTTAATATCACCA |
| | | | | CAAATCGACACATGAGGCTGCTTATTCTTCCCAATTTCCGCAGAATC |
| | | | | AATATCAATATGAACAATCTTAGCTCTGCTAGCAAAAGCCTCAAGCT |
| | | | | TCCCCGTCACACGGTCATCAAACCTTACCCCAAACGCAAGCAACAAA |
| | | | | TCACTCTTATCAACCGCATAATTCGCATAAACCGTCCCATGCATCCCA |
| | | | | AGCATATGCAGCGACAAATCACTAGAAGCAGGGTATGCTCCAAGCC |
| | | | | CCATCAACGTACTCGCAACCGGTATCCCCGTAAGCTCCACAAACCAA |
| | | | | GAAAAGGACGCTGATGTTCTCGTCGAAGCTCTGGAACGTGAAGGC |
| | | | | GTTACAGACGTCTTCGCTTACCCAGGTGGCGCCTCCATGGAGATCC |
| | | | | ACCAAGCTCTCACGCGCTCACCACCATCCGCAACGTTCTCCCACGTC |
| | | | | ACGAACAGGGCGGCGTCTTTGCTGCCGAAGGCTACGCACGTGCCTC |
| | | | | CGGTCTTCCCGGCGTCTGTATTGCAACCTCTGGTCCTGGAGCTACGA |
| | | | | ACCTAGTAAGTGGTCTTGCTGATGCTTTATTAGACAGTGTTCCAATG |
| | | | | GTTGCTATTACTGGTCAAGTTCCCAGGAGAATGATTGGAACAGATG |
| | | | | CGTTTCAAGAAACCCCTATTGTTGAGGTAACACGTTCCATTACTAAG |
| | | | | CATAATTATTTAGTTTTGGATGTCGAGGATATTCCCAGGATTGTTAG |
| | | | | GGAAGCTTTTTATCTTGCGTCTTCTGGTCGACCCGGACCGGTTTTAA |
| | | | | TTGATGTACCTAAGGATATACAGCAGCAGTTGGTAGTGCCTAAATG |
| | | | | GGATGAGCCTATTAGGTTACCTGGGTATTTGTCTAGGTTGCCTAAAA |
| | | | | CGGAGAATAATGGGCAGTTGGAACAGATTGTTAGGTTGGTGAGTG |
| | | | | AGGCCAAGAGGCCGGTTTTGTATGTGGGGGGTGGGTGTTTGAATT |
| | | | | CGGGGGATGAGTTGAGGCGGTTTGTGGAGCTTACGGGGATACCGG |
| | | | | TTG |
| 38 | Digitaria | gDNA | 5667 | GGAGTAGGGACCACATACAACAGAGTATGATACTATACAATGCATC |
| | sanguinalis | Contig | | TAAACCATGATTCAAGAATATAATCATATGGTAATCATGCATTAGGA |
| | | | | TCCACTGACAGCAGCAGATCTTTGTATGGTTATATGTTCATATTCCG |
| | | | | ATGGACAATTTAACAAACAAAACAAATCCTTGTGGATCCATTGTGG |
| | | | | GGATATTCATTTTCTCAGTACAAGACACATTGAACAAATGGTTAGAC |
| | | | | AAACCCTTGTCTTCCCTTCCTCCTCTGGTTAAGAAGAAGTCTTCAATC |
| | | | | TCACTCAGAGCCCAAAGAACACAATCTATAAAAAATTGAAACGAAA |
| | | | | GGCCTAATAAGAGTATATCAATATACACTAGGTTACATGTGTTTGCA |
| | | | | ACCAGGGTCGTGAAAGCCAATGCTACTAAGTAGTTTTATCCATTACA |
| | | | | TGGAACTCAATATTCAAGAAAAAACATATCCATGATTGCAACTACAA |
| | | | | TTTTAACCATATGTGACTACTGAAAATCAAAACTTTTGCAGGAACAT |
| | | | | TGCAGCTATCCACAGCTCCACTATCCCCTGAATTGCTGGATTGTGAT |
| | | | | CCTTTATATTTTTTTTTCCAGAGCCCGCTAGAACCATAAACTGATACA |
| | | | | AATCAAACATACGAGTTAATTTTACTAGGATTGAAATTTTTATACGG |
| | | | | CAGATCATAAAACCATCCATCGCTTTGAAATGGTAATTTAATCAATC |
| | | | | ATGCCAACACGACAGTACAGGACATGCTTATATGCACAAACCATAT |
| | | | | ACGTGGCCTAAAACTCTTCAGGGCAGTTATTCAAAAACCAAACCAA |
| | | | | CAGAGGCACCTACTAGGGTTTTACATATCTGACAAGACGCGTCATG |
| | | | | ATCACTTGAGCCAGGCAAAATATCCCAAGGGGATCACAAATATCAT |
| | | | | ATTTTATTCTGGTTGTCTCACTCCGTCAAGCACAGGCTATCAAGGAA |
| | | | | CAATAAACAAAAACTGCCCTCATTGATCAAGACCGCCTAATAATATT |
| | | | | GCAAAGCTCAGACCTATCGCCAGCGAAACACAAGAAGGGTCTAAAT |
| | | | | TTATCCTGAAATTAAGAAAGAAATAAAATTAAACAAGCATGACAGT |
| | | | | TCCTCTCACTGTAGGGTTTGCAGCATTGCTTGAAGATGTGCCGAAA |
| | | | | GGGGAGGGAACAGAGCGGGGGGTGGGAGGTGACCTCTGTAGTCG |
| | | | | ACGCCGGAGTTGAGCTTGACGACGACGGGTCGGCCCCTGATGGAC |
| | | | | TTGAGAAAGTCCGACGGCGTCTTCACCGCCCCGCCGCCCGAGCCGG |
| | | | | GCTTGTCGCCGCCGCCGCTGCTCATCTTGCGCGCTATGCCCGTGTGT |
| | | | | TCGCGCATCGCGGGCGAGAGGCGACCCGTTTGGGCTCCGGATTGG |
| | | | | CGGATCCCTTCGTGCCGACCTCGTCCGGTCCACCCGTTTAGCTGGAC |
| | | | | CCCACGTGCCAGTGAGCATACAGGAAAACGACAGTCGACAACCAC |
| | | | | GTCCGCAGTCCAGTCCAAATCGTTTTTTACTTCACCATGTCGTTACCA |
| | | | | GCGCACCTTTCTAAAGTCACTGACACGTCGGTCCCACGTAGGCTTGC |
| | | | | CCCACCGGTCAGTGTGAAGCGTGTATACACGTTTGTGGAGGTGTCG |
| | | | | CCGTCGCTTTACGGCAGCCATCCATGATCCATCTCAACCACACATCT |
| | | | | CGCACGCAAATAAAGTAAGCCAGCCAGGCACGCCCTCCCCACTCTC |
| | | | | CCCATCTCCGTGCCACCCCCCAAAGTCTCAAACCCTCGCCGCCGCCT |
| | | | | CCGAGACAGCCGCCGCCACCATGGCCACGACGACCGCCGCCGCCAC |
| | | | | CGCCGCGGCCGCCGCGCTGACCAGCACCACCACCACCTCCGCGCGC |
| | | | | AGGCCGAGGAGCCGACCCGCGCCCCTCCCGTTCGCCCGTCGCGCCG |
| | | | | GGCCCATCCGGTGCTCCGCGGCGTCGCCGGTGACGGCCCCGGCCAC |
| | | | | CCCCGCCACACCGCTCCGGCCGTGGGGCCCCACCGAGCCCCGCAAG |
| | | | | GGCGCCGACATCCTCGTCGAGGCCCTCGAGCGCTGCGGCGTCCGCG |
| | | | | ATGTCTTCGCCTACCCCGGCGGCGCGTCCATGGAGATCCACCAGGC |
| | | | | GCTCACCCGCTCCCCCGTCATCGCCAACCACCTCTTCCGCCACGAGC |
| | | | | AAGGGGAGGCCTTCGCTGCCTCCGGGTACGCGCGCTCCTCCGGCCG |
| | | | | CGTCGGCGTCTGCGTCGCCACCTCGGGCCCCGGCGCCACCAACCTC |
| | | | | GTCTCCGCGCTCGCCGACGCGCTGCTCGATTCGGTGCCCATGGTCG |
| | | | | CCATCACGGGGCAGGTGCCCCGCCGCATGATCGGCACCGACGCTTT |
| | | | | CCAGGAGACGCCGATCGTCGAGGTTACCCGCTCAATCACCAAGCAC |
| | | | | AACTACCTGGTCCTCGACGTCGAAGACATCCCCCGCGTTGTGCAGG |
| | | | | AGGCGTTCTTCCTCGCCTCCTCTGGTCGCCCCGGGCCGGTGCTCGTG |
| | | | | GACATCCCCAAGGATATCCAGCAGCAGATGGCGGTGCCGGTCTGG |
| | | | | AACACGCCCATGAGTCTGCCAGGGTACATTGCGCGACTCCCCAAGC |
| | | | | CTCCTGCGACTGAATTGCTTGAGCAGGTGCTGCGTCTTGTTGGTGA |
| | | | | GTCACGCCGCCCTGTTCTTTATGTTGGTGGTGGCTGCGCGGCATCC |
| | | | | GGTGAGGAGTTGCGCCGCTTTGTGGAGATGACCGGAATCCCAGTG |
| | | | | ACAACTACTCTGATGGGCCTTGGCAACTTTCCCCAGTGACGACCCAC |
| | | | | TGTCTCTCCGGATGCTTGGTATGCATGGTACCGTGTATGCAAATTAT |
| | | | | GCGGTGGATAAGGCCGACCTGTTGCTTGCATTTGGTGTGCGGTTCG |
| | | | | ATGATCGTGTGACAGGGAAAATTGAGGCTTTTGCAAGCAGGGCTA |
| | | | | AGATTGTGCACATTGACATTGATCCAGCTGAGATTGGTAAGAACAA |
| | | | | GCAGCCACATGTGTCCATCTGTGCGGATGTCAAGCTTGCTTTGCAG |
| | | | | GGCATGAATGCTCTTCTGGAAGGAATCACATCAAAGAAGAGTTTCG |
| | | | | ACTTTGGCCCATGGCAAGATGAGTTGGATCAGCAGAAGAGGGAAT |
| | | | | TCCCCCTAGGGTACAAATCTTTCGATGAGGAGATCCAGCCACAATA |
| | | | | CGCTATCCAGGTTCTGGATGAGCTGACAAAAGGGGAGGCCATCATT |
| | | | | GCTACCGGTGTTGGGCAGCACCAGATGTGGGCAGCACAGTACTAC |
| | | | | ACTTACAAGCGGCCACGGCAATGGTTGTCTTCAGCTGGTCTTGGTG |
| | | | | CTATGGGATTTGGTTTGCCGGCTGCGGCTGGTGCTGCTGTGGCCAA |
| | | | | CCCAGGTGTAACAGTTGTTGACATCGATGGGGATGGTAGCTTCCAA |
| | | | | ATGAACATTCAGGAGTTGGCTTTGATTCATATTGAGAACCTTCCAGT |
| | | | | GAAGGTCTTTGTGCTAAACAACCAGCACCTGGGAATGGTGGTGCAG |
| | | | | TGGGAGGACAGGTTCTACAAAGCCAACCGAGCACACACATACTTGG |
| | | | | GGAACCCAGATAATGAGAGTGAGATATATCCGGATTTTGTGACGAT |
| | | | | TGCCAAAGGATTCAACATCCCAGCAGCCCGTGTGACAAAGAAGAGC |
| | | | | GACGTCCGTGCAGCAATCAAGAAGATGCTTGAGACTCCAGGTCCCT |
| | | | | ACCTGTTGGATATCATCGTCCCACACCAGGAGCATGTGTTACCTATG |
| | | | | ATCCCGAGTGGTGGCGCTTTCAAGGATATGATACTGGATGGTGATG |
| | | | | GCAGGACCGTGTATTGATCTGAACTTCAGCGAGTGCTGTTCTTGCCT |
| | | | | TTCTTTGACATGCATATGAGCTAGTAAAAGAGTGATGCGTGTCTTAC |
| | | | | CTATGTAATGTTCTCCTTTGTTTCTTCGATTCCTAGGGCGTCAACTCT |
| | | | | GGACTGCGTCATTTTCTAATGTGCTTGTCTGATGTACTCTGGTGTGG |
| | | | | TAATCTTAGCTTCCAACCTTCTAGTCCTGCAGTCTGTTGTTATCGTTA |
| | | | | GTGCAGGCATATATGCATCATAAGAGATCATGTAAGTGCCTTTTGCT |
| | | | | ACATAATAAATAAGTTAATAAATGCTGCTATATATGCAGTGGGTTCT |
| | | | | GAATTCTGTTCAGTTGCCAACTAGTTGTTGCTTTTGTTCTCGATTTCT |
| | | | | TTCCCTTGTTTCTACGATTCTCCTTTAGCTGATTCCAATTCAGCATAG |
| | | | | GAGTATGTTGTATGAAAGCATTGAGCAATTGTGCATGAAAGGATAG |
| | | | | GGTGTACAGCGGTGCAGCGCACAAGGCACTCACCGAAAATCAGCTT |
| | | | | GAGCTGCACAAAGGAACCATCTCCAAACATCTGTGCATGAAACACT |
| | | | | GTTGCATTTCTCATTGCGATGTACGCGGGCACGCTGGTCAAAGAAA |
| | | | | GTTCAGCGCCTTCCAAGACACCGGAGCAGTGCAGGGTTGTGAACAA |
| | | | | AGATCACAGCTGCGGCCTTTCGCGGATGGTGAAGAAGATATGCTG |
| | | | | GAGCAACGATCAGTATGGTTCCCACGGAAGAAGAAAAGGTAAAGC |
| | | | | TGTTACAGATGCTGGGCCACACAAGTAGACTTGTCAATCTGGCCCA |
| | | | | ATAAGACTTTGGGCCTCCAAGATTTGGGCCCGTATTTTTGGACCAAG |
| | | | | ACAAGGCCTCATTACGAATTTCGAGGTGTTAAAAAAATCACGAATTT |
| | | | | CTATGCTAGAAGATGTTTTAGGTGTGGGTGCTTCTTTGATACCATCA |
| | | | | TTAAGAACTAAAAATCCTCTCCTACGCGTATGAGTGTTTAAATAGGC |
| | | | | CCAACGCCCTTGTTACATAGTACGCTGAGCACCTGAAGCAAACTTTG |
| | | | | GACATCCTTTCCTTTGTAAAAGCAGCCATCCCATAAGACATGGCAAA |
| | | | | AACTAGACCTTTCAGTACTTGTACTTCTCTATTAAGGCCCTAGAATCA |
| | | | | AGTTTCAGATGAGGAAGCTCAATTAAGAATGTGTTTAGATTGGGAG |
| | | | | AGAAAACACTGTAGATCGTGGTAGGTGTAAGTGGATGAATAGTAA |
| | | | | AAAGTTTGATGAATAATAGAAAATTAATGATAAACAGTAAAAAGTG |
| | | | | CGTTGGAGCCTAAGCTTATTGGGACCTCACTGGTCAATCCACGAGTT |
| | | | | TCTATCTCGTGAATCGTGATCCATTTTGTGCCATTGATGAGAGACGG |
| | | | | CAAAGGGCGCGCCTCACTATACCAAAAAAAAAAAAAAACTCCCTTC |
| | | | | TGTTGGACCGGACAAAAGAGAGAAAGAATCGATGAGCGCGATATA |
| | | | | TGGTGACTGGATCATAATTGTTGCTGGGCTATGCTCACCGAACGGG |
| | | | | CCCGTACAGAGGCCCTTGCCATTAACTGCTAGGATCTCGACTTTTTC |
| | | | | TTTATCAGATTCGTTCGTCCATGATCGGACGGACAAATGCACAGCA |
| | | | | AAACGTCCATTCAGAGCGTGGCGGAGATTACATCATTGCACTATGT |
| | | | | ACACACCACAGTGTTGATCACGCATTTCTCCTGCAAAGACGACGAA |
| | | | | ATTGTAGGCACACGGCGTCACGTAACAACGACGTGAAGCCCAGCTA |
| | | | | CCGTGCGACCGTACGTTCGTGCACGTGTCGGCTAAATAGGGAGCAA |
| | | | | CGTGTTGCCAAAACATTTTCAAGAGCCCTCAAGGTTTGAGCACGGC |
| | | | | TACTTTTTCTTTTCTTTTCTTTTTTTGCCGAAAATGAACTTCATGGATC |
| | | | | TTAGCAGATATTTAAATTGAACATATGTCGTAGCTATGTATTTGGCA |
| | | | | CAAGAAAAATGTTGTGGCCGTTTGAATTTAGTAAATGTAGAGAGCC |
| | | | | TCCCCATGCATACCTGATCGGGTGGGCTCAAACCAATGCAGATTTGT |
| | | | | TGCAATCATAA |
| 39 | Kochia | cDNA | 2001 | ATGGCGTCTACTTCTGCAAATCCCACTTTTACCCCTTTCACCAGTAAA |
| | scoparia | Contig | | CCCCTTAAACCCCGTTCTCCCTTTCACTCTTTCCCATTTCCCTCAAACC |
| | | | | CCAAAACCCCTTCCTCTTCATTTCGCAACCTCAAAATCACATCTTCTC |
| | | | | TCTCTTCTTCACAACCCCCGAAACCACCTTCCGCCGTCAAAACCCACT |
| | | | | CACCACCTTCCCCTCTCACAACCGACGAACCCCCGCAAGGTTTTGTT |
| | | | | TCCCGATTTGCCCCTGACCAACCCAGAAAAGGCTGCGATGTCCTCGT |
| | | | | TGAGGCCCTCGAGCGGGAGGGCGTCACCGACGTGTTCGCTTATCCT |
| | | | | GGTGGCGCATCAATGGAGATTCATCAAGCTCTGACTCGCTCTGATTC |
| | | | | CATACGCAACGTCCTGCCTCGCCACGAGCAAGGCGGGATCTTTGCC |
| | | | | GCGGAGGGGTATGCTCGTGCCACGGGCCGTGTTGGTGTCTGCATT |
| | | | | GCGACATCTGGCCCTGGCGCTACGAACCTCGTGTCCGGGTTTGCTG |
| | | | | ATGCTTTGCTCGATTCCGTTCCACTGGTGGCGATCACGGGGCAGGT |
| | | | | GCCGCGGCGAATGATTGGGACGGATGCTTTTCAGGAGACTCCTATT |
| | | | | GTTGAGGTAACACGGTCTATTACCAAGCATAATTATCTGGTATTAGA |
| | | | | TGTTGAGGATATTCCTAGAATTGTTAAGGAGGCTTTCTTTTTGGCTA |
| | | | | ATTCTGGTAGACCTGGACCTGTTTTGATTGATATTCCTAAGGATATT |
| | | | | CAGCAGCAATTGGTTGTGCCTGATTGGGATCAGGGGGTTAGGTTAG |
| | | | | GTGGGTATGTGTCTAGGTTGCCGAAATCGGTGTTTTCGGCCAATGA |
| | | | | TGAGGGGCTTCTTGAGCAGATTGTGAGGTTGATGAGTGAGGCTAA |
| | | | | GAAGCCTGTGTTGTATGTGGGAGGCGGGTGTTTGAATTCTGGGGA |
| | | | | GGAGTTGAGGAAATTCGTCGAGTTGACTGGGATTCCGGTGGCTAGT |
| | | | | ACTTTAATGGGTTTGGGCGCTTATCCCTGTAATGATGACTTGTCTCT |
| | | | | TCATATGTTGGGTATGCACGGGACCGTGTATGCTAATTATGCTGTTG |
| | | | | ATAAGGCAGATTTGTTGCTTGCCTTTGGGGTTAGGTTTGATGATCGT |
| | | | | GTGACAGGGAAGCTTGAGGCGTTTGCTAGCCGGGCTAAGATCGTG |
| | | | | CATATTGATATTGATTCTGCTGAGATTGGGAAGAATAAGCAACCCC |
| | | | | ATGTGTCAATATGTGCTGATGTCAAGTATGCGTTGAAGGGTATGAA |
| | | | | TAAGATTTTGGAGTCTAGGAAAGGGAAGTTGAATTTGAATTACTCT |
| | | | | AGCTGGAGGGAGGAATTGGGTGAGCAAAAGAAGAAATTCCCATTG |
| | | | | TCTTTTAAGACCTTCGGGGAAGCGATTCCTCCTCAGTATGCCATTCA |
| | | | | GATGCTTGATGAGCTGACCAATGGTAACGCTATTATTAGTACTGGT |
| | | | | GTTGGGCAACATCAAATGTGGGCTGCTCAGCATTACAAGTACAGAA |
| | | | | ACCCTCGCCAATGGCTGACCTCAGGTGGGTTGGGTGCCATGGGTTT |
| | | | | TGGTCTACCAGCCGCCATTGGAGCTGCTGTGGCTCGACCTGATGCA |
| | | | | GTGGTGGTTGATATTGATGGCGATGGGAGTTTCATTATGAATGTTC |
| | | | | AAGAGTTGGCTACTATTAGGGTGGAAAATCTCCCTGTTAAGATAAT |
| | | | | GCTTTTGAATAACCAACATTTAGGTATGGTGGTTCAATGGGAAGAT |
| | | | | AGGTTTTATAAAGCCAATAGGGCACATACTTACCTTGGAAACCCTTC |
| | | | | AAAAGAGTCTGAAATCTTCCCGGATATGCTTAAATTTGCTGAGGCG |
| | | | | TGTGATATTCCTGCTGCTCGTGTCACCAAGGTTGGAGATTTGAGGG |
| | | | | CGGCCATGCAGACAATGTTGGATACTCCGGGACCTTACCTGCTTGA |
| | | | | TGTGATTGTACCTCATCAGGAGCATGTGCTGCCTATGATTCCTAGTG |
| | | | | GTGCAGCCTTCAAGGATATCATTAACGAAGGTGATGGAAGAACAA |
| | | | | GTTATTGA |
| 40 | Kochia | cDNA | 2001 | ATGGCGTCTACTTCTGCAAATCCCACTTTTACCCCTTTCACCAGTAAA |
| | scoparia | Contig | | CCCCTTAAACCCCGTTCTCCCTTTCACTCTTTCCCATTTCCCTCAAACC |
| | | | | CCAAAACCCCTTCCTCTTCATTTCGCAACCTCAAAATCACATCTTCTC |
| | | | | TCTCTTCTTCACAACCCCCGAAACCACCTTCCGCCGTCAAAATCCACT |
| | | | | CACCACCTTCCCCTCTCACAACCGACGAACCCCCGCAAGGTTTTGTT |
| | | | | TCCCGATTTGCCCCTGACCAACCCAGAAAAGGCTGCGATGTCCTCGT |
| | | | | TGAGGCCCTCGAGCGGGAGGGCGTCACCGACGTGTTCGCTTATCCT |
| | | | | GGTGGCGCATCAATGGAGATTCATCAAGCTCTGACTCGCTCTGATTC |
| | | | | CATACGCAACGTCCTGCCTCGCCACGAGCAAGGCGGGATCTTTGCC |
| | | | | GCGGAGGGGTATGCTCGTGCCACGGGCCGTGTTGGTGTCTGCATT |
| | | | | GCGACATCTGGCCCTGGCGCTACGAACCTCGTGTCCGGGTTTGCTG |
| | | | | ATGCTTTGCTCGATTCCGTTCCACTGGTGGCGATCACGGGGCAGGT |
| | | | | GCCGCGGCGAATGATTGGGACGGATGCTTTTCAGGAGACTCCTATT |
| | | | | GTTGAGGTAACACGGTCTATTACCAAGCATAATTATCTGGTATTAGA |
| | | | | TGTTGAGGATATTCCTAGAATTGTTAAGGAGGCTTTCTTTTTGGCTA |
| | | | | ATTCTGGTAGACCTGGACCTGTTTTGATTGATATTCCTAAGGATATT |
| | | | | CAGCAGCAATTGGTTGTGCCTGATTGGGGTCAGGGGGTTAGGTTA |
| | | | | GGTGGGTATGTGTCTAGGTTGCCGAAATCGGAGTTTTCGGCCAATG |
| | | | | ATGAGGGGCTTCTTGAGCAGATTGTGAGGTTGATGAGTGAGGCTA |
| | | | | AGAAGCCTGTGTTGTATGTGGGAGGCGGGTGTTTGAATTCTGGGG |
| | | | | AGGAGTTGAGGAAATTCGTCGAGTTGACTGGGATTCCGGTGGCTA |
| | | | | GTACTTTAATGGGTTTGGGCGCTTATCCCTGTAATGATGACTTGTCT |
| | | | | CTTCATATGTTGGGTATGCATGGGACCGTGTATGCTAATTATGCTGT |
| | | | | TGATAAGGCAGATTTGTTGCTTGCCTTTGGGGTTAGGTTTGATGATC |
| | | | | GTGTGACAGGGAAGCTTGAGGCGTTTGCTAGCCGGGCTAAGATCG |
| | | | | TGCATATTGATATTGATTCTGCTGAGATTGGGAAGAATAAGCAACC |
| | | | | CCATGTGTCAATATGTGCTGATGTCAAGTATGCGTTGAAGGGTATG |
| | | | | AATAAGATTTTGGAGTCTAGGAAAGGGAAGTTGAATTTGAATTACT |
| | | | | CTAGCTGGAGGGAGGAATTGGGTGAGCAAAAGAAGAAATTCCCAT |
| | | | | TGTCTTTTAAGACCTTCGGGGAAGCGATTCCTCCTCAGTATGCCATT |
| | | | | CAGATGCTTGATGAGCTGACCAATGGTAACGCTATTATTAGTACTG |
| | | | | GTGTTGGGCAACATCAAATGTGGGCTGCTCAGCATTACAAGTACAG |
| | | | | AAACCCTCGCCAATGGCTGACCTCAGGTGGGTTGGGTGCCATGGGT |
| | | | | TTTGGTCTACCAGCCGCCATTGGAGCTGCTGTGGCTCGACCTGATG |
| | | | | CAGTGGTGGTTGATATTGATGGCGATGGGAGTTTCATTATGAATGT |
| | | | | TCAAGAGTTGGCTACTATTAGGGTGGAAAATCTCCCTGTTAAGATA |
| | | | | ATGCTTTTGAATAACCAACATTTAGGTATGGTGGTTCAATGGGAAG |
| | | | | ATAGGTTTTATAAAGCCAATAGGGCACATACTTACCTTGGAAACCCT |
| | | | | TCAAAAGAGTCTGAAATCTTCCCGGATATGCTTAAATTTGCTGAGGC |
| | | | | GTGTGATATTCCTGCTGCTCGTGTCACCAAGGTTGGAGATTTGAGG |
| | | | | GCGGCCATGCAGACAATGTTGGATACTCCGGGACCTTACCTGCTTG |
| | | | | ATGTGATTGTACCTCATCAGGAGCATGTGCTGCCTATGATTCCTAGT |
| | | | | GGTGCAGCCTTCAAGGATATCATTAACGAAGGTGATGGAAGAACA |
| | | | | AGTTATTGA |
| 41 | Kochia | gDNA | 6022 | ATAGAAGTTATGGCAATCGCGGGGTGTTTGTTTTGTGGGAATAGAT |
| | scoparia | Contig | | GGGTGGGAATGGGAATTTTAATTCCAATGTCCTAACTCCCACGTTTG |
| | | | | TTTGTAGGGAATGAGATTATTTGAGAGAAGGGGAATGAGATTATTT |
| | | | | GGGGTCAATTTCAATAGTTTTATTACATGAGAGGTTGGTAACTTGGT |
| | | | | ATTTGGGTGGGAATTCATATTTCTTTTGTTTTTTTCTTTTGTTTTTGCT |
| | | | | GAAAGTTATTTCTTCATCTCATTTTATTTCCTTTTTTAAAAAAAAAATT |
| | | | | CTCATTTATTTCCAAATTAATACCAAGCAAGAGATTGAGATAATTTT |
| | | | | ATCAATTTTCACATTTCAATTTACATTCTCATTTTCATTTCCACTTGTC |
| | | | | AAATGTCCCGGCATGACATGGAACACGCAACACACCATAAGCTCAT |
| | | | | TAGATCATTTGTCGGAGTTTCGATTTTCAGCATATACACCTATTGACC |
| | | | | TGTCACCATCCATGGTAAAATGTTGATATGTGGGCTAAGCCACATCA |
| | | | | CGTAATGTCGTAATCTGCTTTTAAAAGCACATTAAGTTACATAATTTT |
| | | | | CAACACGCGCATTGCTATCAACTTGCATTGTTCCACTTGTATATCATT |
| | | | | GCTGAAGTATTATAATCGAGCGATCTGTTTTTGCACAATACAGAATC |
| | | | | GGATTTGCAACAGAAAATAGAAACAAGTAAAATCAGGATCAGATG |
| | | | | CTCAAAGCCTCATGTCATTGTTTCCATTTAAACAAAAAAACATGTCA |
| | | | | TTATAATTCCCATGCCCATATATTTAGGTAAATATTCCTGCTCGGATA |
| | | | | TTCTACGAAAAATAGAAAATTAAAGGCCATATAGGTCTAATGAACT |
| | | | | AGCTAAATCGAATCTGTAGAAGATTTTTAACATTTTAACTTTGTAAA |
| | | | | ATATGAAAATAATTATTCTTCTAAGCTTTGCACAATAGTCGCATTTTG |
| | | | | TTGTTGTCGTATAAAAAAAACATTGCATAGACAATAACTTAGATTTC |
| | | | | CAACGAATTAACTACTCCGTAACTTGTATTCCACGTGCATAGAAAAT |
| | | | | GTAGCATTTTATGTTTATTTCTCTATTTATAAGTGGGGCAAATCTTGT |
| | | | | AAATAACTATCTATGTATTCAATAAAAATAATCATGTGGTGTCTTGT |
| | | | | TTGATTTGTATTAATGAGTAGATTATCAACATTTAATTATTATAATTT |
| | | | | TTACATATCTACATTTAAAGATATAAACATTATAAGACATGTATTGA |
| | | | | GAAACATATAAATAGTAAATGACTGCGTTTTCACGGAACAAAATGA |
| | | | | ATACCTTATATAAAATGTAATTATTTGTTCATTTATTTTTAATTTTGTC |
| | | | | ACTGTATGACATTTTTAGTTATTTTTTTATTTTATTATTATATTTTATTT |
| | | | | TATACTTTCACCGTTTTTAAAATTTTTAAAAAAGTAATTTTTTATCTCT |
| | | | | CACAAAAAATGTCCCTTGTCGCAAGTTTTTGAAAACAAAAGAAGTA |
| | | | | ATAAAACTCAATTATGGATTGAGAGCTACATATAACATATATAAGAA |
| | | | | AATGAATGTATGACTCAACATACTCAATAAATAAATTGGATTTTGCG |
| | | | | ATCAAGTTTGTGGGCTTTATCCTTTCAATTAAAATGTATACTTGATGC |
| | | | | AACACAATCTAATGAGTAATGACATCTTTGATATGAAGTGTATCAAA |
| | | | | TATCTAAATAAATTATTTCAAAAATGGAGAACAAATATTAACCACGA |
| | | | | AATGAGTAGTAGAAAAAAGGAAACACCTTTTTTATTTGCATTATTAT |
| | | | | TATTACTTTATGTAGGAAAACTCCATTTGGAGTCTTGACAAAAACAA |
| | | | | ATGAATGAAAAAAGACTTTTTGGTTTTGGTAATTTAAGCTAAAAAG |
| | | | | AAAAAGAAAAAAGAAAAAAGAAAAAGGAGAAAACCAGAGTTGAG |
| | | | | CGCCTCCACTAGTTGTTTTCCTTTCCTTCCTCGGAAGAACCCTATTTC |
| | | | | TTCCTCCCTCATATGATATCCTTCCTTCAAACTCCACACTCCTCTCTTT |
| | | | | CATTTTCTCTCTGATCATACCTTCAACCTTCAACAATGGCGTCTACTT |
| | | | | CTGCAAATCCCACTTTTACCCCTTTCACCAGTAAACCCCTTAAACCCC |
| | | | | GTTCTCCCTTTCACTCTTTCCCATTTCCCTCAAACCCCAAAACCCCTTC |
| | | | | CTCTTCATTTCGCAACCTCAAAATCACATCTTCTCTCTCTTCTTCACAA |
| | | | | CCCCCGAAACCACCTTCCGCCGTCAAAACCCACTCACCACCTTCCCCT |
| | | | | CTCACAACCGACGAACCCCCGCAAGGTTTTGTTTCCCGATTTGCCCC |
| | | | | TGACCAACCCAGAAAAGGCTGCGATGTCCTCGTTGAGGCCCTCGAG |
| | | | | CGGGAGGGCGTCACCGACGTGTTCGCTTATCCTGGTGGCGCATCAA |
| | | | | TGGAGATTCATCAAGCTCTGACTCGCTCTGATTCCATACGCAACGTC |
| | | | | CTGCCTCGCCACGAGCAAGGCGGGATCTTTGCCGCGGAGGGGTAT |
| | | | | GCTCGTGCCACGGGCCGTGTTGGTGTCTGCATTGCGACATCTGGCC |
| | | | | CTGGCGCTACGAACCTCGTGTCCGGGTTTGCTGATGCTTTGCTCGAT |
| | | | | TCCGTTCCACTGGTGGCGATCACGGGGCAGGTGCCGCGGCGAATG |
| | | | | ATTGGGACGGATGCTTTTCAGGAGACTCCTATTGTTGAGGTAACAC |
| | | | | GGTCTATTACCAAGCATAATTATCTGGTATTAGATGTTGAGGATATT |
| | | | | CCTAGAATTGTTAAGGAGGCTTTCTTTTTGGCTAATTCTGGTAGACC |
| | | | | TGGACCTGTTTTGATTGATATTCCTAAGGATATTCAGCAGCAATTGG |
| | | | | TTGTGCCTGATTGGGATCAGGGGGTTAGGTTAGGTGGGTATGTGTC |
| | | | | TAGGTTGCCGAAATCGGTGTTTTCGGCCAATGATGAGGGGCTTCTT |
| | | | | GAGCAGATTGTGAGGTTGATGAGTGAGGCTAAGAAGCCTGTGTTG |
| | | | | TATGTGGGAGGCGGGTGTTTGAATTCTGGGGAGGAGTTGAGGAAA |
| | | | | TTCGTCGAGTTGACTGGGATTCCGGTGGCTAGTACTTTAATGGGTTT |
| | | | | GGGCGCTTATCCCTGTAATGATGACTTGTCTCTTCATATGTTGGGTA |
| | | | | TGCACGGGACCGTGTATGCTAATTATGCTGTTGATAAGGCAGATTT |
| | | | | GTTGCTTGCCTTTGGGGTTAGGTTTGATGATCGTGTGACAGGGAAG |
| | | | | CTTGAGGCGTTTGCTAGCCGGGCTAAGATCGTGCATATTGATATTG |
| | | | | ATTCTGCTGAGATTGGGAAGAATAAGCAACCCCATGTGTCAATATG |
| | | | | TGCTGATGTCAAGTATGCGTTGAAGGGTATGAATAAGATTTTGGAG |
| | | | | TCTAGGAAAGGGAAGTTGAATTTGAATTACTCTAGCTGGAGGGAG |
| | | | | GAATTGGGTGAGCAAAAGAAGAAATTCCCATTGTCTTTTAAGACCT |
| | | | | TCGGGGAAGCGATTCCTCCTCAGTATGCCATTCAGATGCTTGATGA |
| | | | | GCTGACCAATGGTAACGCTATTATTAGTACTGGTGTTGGGCAACAT |
| | | | | CAAATGTGGGCTGCTCAGCATTACAAGTACAGAAACCCTCGCCAAT |
| | | | | GGCTGACCTCAGGTGGGTTGGGTGCCATGGGTTTTGGTCTACCAGC |
| | | | | CGCCATTGGAGCTGCTGTGGCTCGACCTGATGCAGTGGTGGTTGAT |
| | | | | ATTGATGGCGATGGGAGTTTCATTATGAATGTTCAAGAGTTGGCTA |
| | | | | CTATTAGGGTGGAAAATCTCCCTGTTAAGATAATGCTTTTGAATAAC |
| | | | | CAACATTTAGGTATGGTGGTTCAATGGGAAGATAGGTTTTATAAAG |
| | | | | CCAATAGGGCACATACTTACCTTGGAAACCCTTCAAAAGAGTCTGA |
| | | | | AATCTTCCCGGATATGCTTAAATTTGCTGAGGCGTGTGATATTCCTG |
| | | | | CTGCTCGTGTCACCAAGGTTGGAGATTTGAGGGCGGCCATGCAGAC |
| | | | | AATGTTGGATACTCCGGGACCTTACCTGCTTGATGTGATTGTACCTC |
| | | | | ATCAGGAGCATGTGCTGCCTATGATTCCTAGTGGTGCAGCCTTCAA |
| | | | | GGATATCATTAACGAAGGTGATGGAAGAACAAGTTATTGATGTTCG |
| | | | | TATCGATGGTTGAAAGCATCTATAGAGGGGGAAGCAAAATAAGAA |
| | | | | TAATAATCTGTATGTATAATAGTATGTTCCTTTTAAATTTTTAGCGTC |
| | | | | TGTTTACTTGTTTTTTTAGTTTTCTAGTTAGTTTGTCGTTGTTATGTTG |
| | | | | CTTGTTACTTTGAGAATGCTTTTTTGTAGTTTTCAAGAGACGAGTAT |
| | | | | GGATGATCTTCCTATATTGTTCAAAGATTTCACCAAGTGGTCTTTGG |
| | | | | ACTATGTATGTTGTATTTGATGTTTGGTTAGTTATGTTAATTGTCCTA |
| | | | | ATGCAAGCGTTGTTAAAATCGCCATTTGACACTCATTAGACCTTACT |
| | | | | TCTATATATTTGTAAGCTGCTTATTGGATGATTTTAAACACCTCCTTG |
| | | | | TTTTGCTTGTCTAATGGACTTTTGTTGCTATACATAATAATGTTTAAC |
| | | | | TCCAAAACAACCAAAAAAAGATTCTGGCACAACCAGTTCTACTACCA |
| | | | | TAAAATAAGGTTATGAAGTGCTTTAGAGATAAGCACAAGCTTGGGA |
| | | | | AGATAGTAGTGGCTGCTCATACTTTTGGTTCTTCTGAAAAGAACATA |
| | | | | TGATTGTGAAGAAACTGCCTAAACATTTGCATTTCCTTGAGGTTGAG |
| | | | | GTTTGTAGATGATTAGTGTGAAAGCCCTTTGCAGGTGTTGAGAACT |
| | | | | TGAGATTGAGGTTTAGGTTAGAGATTTGGAGTGGAAGTTGGTAAGT |
| | | | | ACGACTTTTGCCGAAACTTCAGGAGCATAACGTGTCTCGGCAAGTT |
| | | | | AAGCAGGCAAGCATTTACAAGGAAAGGGTATTTGAACAATAGGTTT |
| | | | | ATATTGATCCCAAGAGTATGCTATACATTTGTCATGATCGAACAACT |
| | | | | TGCTACTTAAGAGATTTGTGTCATGCCTTTGAGTTATTGAGAAAAGG |
| | | | | AGTGAGCTAGATCCAGAATAACTTGAGGGAATTTAGAGACTTCATT |
| | | | | CCTATGAATCCAAATGGCCCGTAGTATGGTTAAAAACTGGCTACATT |
| | | | | TAATTCAATCTCTTTTAACAAATTAAAGGACAAAAATCTTGCAACCA |
| | | | | TTGTTCCAGTGAAATATTAGCTGCTAGGTCCGTGCGAATTCCTAGAA |
| | | | | CACCAAGATCGAAAAGTTCATAAACCCTAAATCCTGGCTTCCTTAAA |
| | | | | TTAGTTTTAACTGCTGAAGCATGGCATAGAACTTCATCTTCTTGTAA |
| | | | | ATACTTCCTCGGTTTGTTTTAGATGTTATATTTATTTGGGCCTAAACT |
| | | | | TTGGACCAAAATTAGAAAATTTTAATTAGAAGATGTAATTAGGGAA |
| | | | | ATGATGAATTAATTAAACAACTAACCAACCTAATCTCTACCACTAAA |
| | | | | CAACCTACCAACCACAGACCACCTCCAAACCCTAGCCGCCATCACCG |
| | | | | CCGCCGTCACCAAACCACCATCGACTACCAGACTCAAATCTCCAAAT |
| | | | | AGTCGCGACCACCACCAAACCCACGCCATGACCATCGACCACCACC |
| | | | | AAACCCTTGCTGCAAACCACACTTTGAGTCAACCACCGCAACAATTT |
| | | | | TTGAGCAATTTATGAGATTTTGAACTAATTTCGAACAACTTATGAGA |
| | | | | TTTTCAAAGAATTTCTCAGATTTCGAACTAATTGCTTTAAGATTTTGA |
| | | | | ACAATTTGACAAATTTCAAACCAATTTTTGAGATTTCAAATCAATTTC |
| | | | | CTCTAGCTTTCGAACCAACTTGAGGAGATTTCGAATAAGTTTTAAGA |
| | | | | ATTCGAATCAATTTCTTTGAGCTTTGACCGATTTGTGTGTTTTGGGT |
| | | | | GGTTCAATGGGGGCACTTTGGTGGTCTGTGTGGTGCTGTAAAACAT |
| | | | | TGATGTGCGAATGTGCGATTGGGGTGGTGCGATTGGGGTGGTGCG |
| | | | | GTGGTGTGTAGCTGGGTGGTATGCAGATATGGTGAGCCGTGGATG |
| | | | | TCATGGGTGGTTGTTGATGCGGTGTATTAGAGATATTAATTGCTTAA |
| | | | | GATGTTAATAATATTTGATTAGTTTATGTTTAATTGTGGGTACGACT |
| | | | | GTAAATCCACATGTAAAAAGTTACAA |
| 42 | Kochia | gDNA | 2514 | AAAATGGAGAACAAATATTAACCACGAAATGAGTAGTAGAAAAAA |
| | scoparia | Contig | | GGAAACACCTTTTTTATTTGCATTATTATTATTACTTTATGTAGGAAA |
| | | | | ACTCCATTTGGAGTCTTGACAAAAACAAATGAATGAAAAAAGACTT |
| | | | | TTTGGTTTTGGTAATTTAAGCTAAAAAGAAAAAGAAAAAGAAAAAG |
| | | | | GAGAAAACCAGAGTTGAGCGCCTCCACTAGTTGTTTTCCTTTCCTTC |
| | | | | CTCGGAAGAACCCTATTTCTTCCTCCCTCATATGATATCCTTCCTTCA |
| | | | | AACTCCACACTCCTCTCTTTCATTTTCTCTCTGATCATACCTTCAACCT |
| | | | | TCAACAATGGCGTCTACTTCTGCAAATCCCACTTTTACCCCTTTCACC |
| | | | | AGTAAACCCCTTAAACCCCGTTCTCCCTTTCACTCTTTCCCATTTCCCT |
| | | | | CAAACCCCAAAACCCCTTCCTCTTCATTTCGCAACCTCAAAATCACAT |
| | | | | CTTCTCTCTCTTCTTCACAACCCCCGAAACCACCTTCCGCCGTCAAAA |
| | | | | TCCACTCACCACCTTCCCCTCTCACAACCGACGAACCCCCGCAAGGT |
| | | | | TTTGTTTCCCGATTTGCCCCTGACCAACCCAGAAAAGGCTGCGATGT |
| | | | | CCTCGTTGAGGCCCTCGAGCGGGAGGGCGTCACCGACGTGTTCGCT |
| | | | | TATCCTGGTGGCGCATCAATGGAGATTCATCAAGCTCTGACTCGCTC |
| | | | | TGATTCCATACGCAACGTCCTGCCTCGCCACGAGCAAGGCGGGATC |
| | | | | TTTGCCGCGGAGGGGTATGCTCGTGCCACGGGCCGTGTTGGTGTCT |
| | | | | GCATTGCGACATCTGGCCCTGGCGCTACGAACCTCGTGTCCGGGTT |
| | | | | TGCTGATGCTTTGCTCGATTCCGTTCCACTGGTGGCGATCACGGGG |
| | | | | CAGGTGCCGCGGCGAATGATTGGGACGGATGCTTTTCAGGAGACT |
| | | | | CCTATTGTTGAGGTAACACGGTCTATTACCAAGCATAATTATCTGGT |
| | | | | ATTAGATGTTGAGGATATTCCTAGAATTGTTAAGGAGGCTTTCTTTT |
| | | | | TGGCTAATTCTGGTAGACCTGGACCTGTTTTGATTGATATTCCTAAG |
| | | | | GATATTCAGCAGCAATTGGTTGTGCCTGATTGGGGTCAGGGGGTTA |
| | | | | GGTTAGGTGGGTATGTGTCTAGGTTGCCGAAATCGGAGTTTTCGGC |
| | | | | CAATGATGAGGGGCTTCTTGAGCAGATTGTGAGGTTGATGAGTGA |
| | | | | GGCTAAGAAGCCTGTGTTGTATGTGGGAGGCGGGTGTTTGAATTCT |
| | | | | GGGGAGGAGTTGAGGAAATTCGTCGAGTTGACTGGGATTCCGGTG |
| | | | | GCTAGTACTTTAATGGGTTTGGGCGCTTATCCCTGTAATGATGACTT |
| | | | | GTCTCTTCATATGTTGGGTATGCATGGGACCGTGTATGCTAATTATG |
| | | | | CTGTTGATAAGGCAGATTTGTTGCTTGCCTTTGGGGTTAGGTTTGAT |
| | | | | GATCGTGTGACAGGGAAGCTTGAGGCGTTTGCTAGCCGGGCTAAG |
| | | | | ATCGTGCATATTGATATTGATTCTGCTGAGATTGGGAAGAATAAGC |
| | | | | AACCCCATGTGTCAATATGTGCTGATGTCAAGTATGCGTTGAAGGG |
| | | | | TATGAATAAGATTTTGGAGTCTAGGAAAGGGAAGTTGAATTTGAAT |
| | | | | TACTCTAGCTGGAGGGAGGAATTGGGTGAGCAAAAGAAGAAATTC |
| | | | | CCATTGTCTTTTAAGACCTTCGGGGAAGCGATTCCTCCTCAGTATGC |
| | | | | CATTCAGATGCTTGATGAGCTGACCAATGGTAACGCTATTATTAGTA |
| | | | | CTGGTGTTGGGCAACATCAAATGTGGGCTGCTCAGCATTACAAGTA |
| | | | | CAGAAACCCTCGCCAATGGCTGACCTCAGGTGGGTTGGGTGCCATG |
| | | | | GGTTTTGGTCTACCAGCCGCCATTGGAGCTGCTGTGGCTCGACCTG |
| | | | | ATGCAGTGGTGGTTGATATTGATGGCGATGGGAGTTTCATTATGAA |
| | | | | TGTTCAAGAGTTGGCTACTATTAGGGTGGAAAATCTCCCTGTTAAG |
| | | | | ATAATGCTTTTGAATAACCAACATTTAGGTATGGTGGTTCAATGGGA |
| | | | | AGATAGGTTTTATAAAGCCAATAGGGCACATACTTACCTTGGAAAC |
| | | | | CCTTCAAAAGAGTCTGAAATCTTCCCGGATATGCTTAAATTTGCTGA |
| | | | | GGCGTGTGATATTCCTGCTGCTCGTGTCACCAAGGTTGGAGATTTG |
| | | | | AGGGCGGCCATGCAGACAATGTTGGATACTCCGGGACCTTACCTGC |
| | | | | TTGATGTGATTGTACCTCATCAGGAGCATGTGCTGCCTATGATTCCT |
| | | | | AGTGGTGCAGCCTTCAAGGATATCATTAACGAAGGTGATGGAAGA |
| | | | | ACAAGTTATTGATGTTCGTATCGATGGTTGAAAGCATCTATAGAGG |
| | | | | GGGAAGCAAAATAAGAATAATAATCTGTATGTATAATAGTATGTTC |
| | | | | CTTTTAAATTTTTAGCGTCTGTTTACTTGTTTTTTTAGTTTTCTAGTTA |
| | | | | GTTTGTCGTTGTTATGTTGCTTGTTACTTTGAGAATGCTTTTTTGTAGT |
| 43 | Lolium | cDNA | 2152 | GCCGCCGCCGCCGCCATGGCAACTGCCACTTCGACAGCCGTCGCCT |
| | multiflorum | Contig | | TCTCGGGAGCCACCGCCACCTTGCCCAAACCACGCACTCTCCCGCGT |
| | | | | CACCAACTGCCCTCCTCACGCCGCGCCCTCGCCGCCCCCATCAGGTG |
| | | | | CTCCGCGGTGTCCCCATCGCCCTCGCCCGCCCCTCCCGCCACCGCGC |
| | | | | TCCGCCCATGGGGCCCATCCGAGCCCCGCAAGGGCGCCGACATCCT |
| | | | | CGTCGAGGCCCTCGAGCGCTGCGGCATCAGCGACGTCTTCGCCTAC |
| | | | | CCGGGCGGCGCCTCAATGGAGATCCACCAGGCGCTCACGCGCTCGC |
| | | | | CGCTCATCACCAACCACCTCTTCCGCCACGAGCAGGGCGAGGCCTT |
| | | | | CGCGGCGTCCGGGTACGCGCGGGCGTCCGGCCGCGTCGGGGTCTG |
| | | | | CGTCGCCACCTCCGGCCCGGGGGCCACCAACCTCGTCTCCGCGCTC |
| | | | | GCCGACGCCCTCCTCGACTCCATCCCCATGGTGGCCATCACGGGGC |
| | | | | AGGTCCCGCGCCGCATGATCGGCACGGACGCCTTCCAGGAGACGC |
| | | | | CCATCGTCGAGGTCACCCGCTCCATCACCAAGCACAACTACCTCGTC |
| | | | | CTCGACGTCGAGGACATCCCCCGCGTCATCCAGGAAGCCTTCTTCCT |
| | | | | CGCCTCCTCTGGCCGCCCGGGCCCGGTGCTCGTCGACATCCCCAAG |
| | | | | GACATCCAGCAGCAGATGGCTGTGCCCGTCTGGGACGCGCCCATGA |
| | | | | GTCTGCCAGGCTACATTGCCCGCCTGCCTAAGCCGCCGGCTACTGA |
| | | | | ATTGCTCGAGCAGGTCCTGCGTCTGGTTGGCGAGGCGAGACGCCC |
| | | | | GATTCTCTATGTTGGCGGTGGCTGCTCTGCGTCCGGGGAGGAGCTG |
| | | | | CGCCGCTTTGTTGAGCTCACTGGGATCCCTGTTACAACTACCCTCAT |
| | | | | GGGTCTTGGCAACTTCCCCAGCGACGACCCGCTGTCTCTGCGTATGC |
| | | | | TTGGGATGCATGGCACTGTGTACGCAAACTACGCCGTAGATAAGGC |
| | | | | TGACCTGTTGCTTGCATTTGGCGTGAGGTTTGATGATCGCGTGACT |
| | | | | GGGAAAATCGAGGCTTTTGCAAGCAGGTCCAAGATTGTGCACATTG |
| | | | | ACATTGATCCAGCTGAGATTGGCAAGAACAAGCAGCCGCATGTCTC |
| | | | | CATTTGCGCAGATGTCAAGCTCGCTTTGCAGGGCCTGAATGCTCTGC |
| | | | | TAACTGGGAGCAAAGCACACAAGAGTTTCGATTTTGCTTCGTGGCA |
| | | | | TGACGAGTTGGAGCAGCAGAAAAGGGAGTTTCCTCTGGGATACAA |
| | | | | AACTTTCGGGGAGGCCATCCCACCGCAATATGCTATCCAGGTACTG |
| | | | | GATGAGCTCACCAAAGGTGAGGCCATCATTGCCACTGGTGTTGGGC |
| | | | | AGCACCAGATGTGGGCGGCTCAGTATTACACCTACAAGCGCCCACG |
| | | | | GCAGTGGCTGTCTTCGGCTGGTCTGGGGGCAATGGGGTTTGGGTT |
| | | | | GCCAGCTGCAGCTGGCGCCGCTGTGGCTAACCCAGGTGTCACAGTT |
| | | | | GTTGACATTGATGGGGATGGTAGCTTCCTCATGAACATTCAGGAGT |
| | | | | TGGCGCTGATTCGCATTGAGAACCTCCCAGTTAAGGTGATGATATT |
| | | | | GAACAACCAGCATCTTGGAATGGTGGTGCAGTGGGAGGACAGGTT |
| | | | | TTACAAGGCCAATCGGGCGCATACATACCTTGGGAACCCAGAAAAT |
| | | | | GAGAGTGAGATATATCCAGATTTTGTGACCATTGCTAAAGGCTTCA |
| | | | | ATGTTCCTGCAGTTCGTGTGACAAAGAGGAGTGAAGTCCGTGCAGC |
| | | | | GATCAAGAAGATGCTTGAGACTCCTGGGCCATACTTGTTGGATATC |
| | | | | ATCGTCCCTCACCAGGAGCATGTGCTGCCTATGATCCCTAGCGGTG |
| | | | | GTGCTTTCAAGGACATTATCATGGAAGGTGATGGCAGGATTGCGTA |
| | | | | TTAATCGCAACTTCTGCAAGAGCTCCACCTACAAGACCTACAAGTGC |
| | | | | AATATGCCTGATCAGCATGATGCTGGTGTATGTTATATCCATGTGTT |
| | | | | CGCTAATTTGCTTGTTTGATGAGCTTGGTTTGCTAGTCTTACCTAGCT |
| | | | | CTGAACCTTCTAGGTTTTCTAGTCTGTTCTTTTCCGTAGGCATATGCT |
| | | | | GTCATAAGAGATCATGCAAGTTTCTTGT |
| 44 | Lolium | gDNA | 14102 | GGCCCAACACTGTCTACAGGAATAGAAGCGTGCGTAGACATCACTA |
| | multiflorum | Contig | | GGATTTATTGAATACATTCATGCTATATTGTTGCTGCCTAGTCTTTCG |
| | | | | TTCATTGCATATTTATTCAGATCAATAATTTTGTGGAAATATTAATCC |
| | | | | TCTTCATTATGAATCAAGATTTGATATCAATTTCTGCTCATGCTTACT |
| | | | | TTATTTCCAAGTGGGAAAAATTCACGTAGTTGTAGGTCACTAGATGT |
| | | | | TTTTGGGTATCCATTTGGATGAGCTGCATGTGGATCTATCAGAAGCA |
| | | | | TCGCTAGGTTGGTTTTGGTGTCTGTCTGAGAGGAGGTTTGTCTCACC |
| | | | | TTCTCCTAAACTTGATAACTTGTTTGCTGCCTGTGTGGATTGGAATTT |
| | | | | TATAGAAATTTTGGTTCCGGGAAATGTCAATCACATTGTTCTCTGAC |
| | | | | TGTTTATGTATGGTTTGGGTTGCTGATGTCTGCTTCCCTTCTGGAAC |
| | | | | AGGCTTTGGTTGGACCTCGGATCGAGCTTATGTTAGACTTTGACCCA |
| | | | | AGATATGATGACAAACTTATATGTGTTGTTGCTTCAAATGTCCTTCA |
| | | | | TTTGTTATTAGTGGATTAGGGAAAAACTTTCTGGTAGCAAACCAAGT |
| | | | | TGGCTATAGTGTTTATTGATTTGTTAGCTTGTTCCATGCCTGTCTGTA |
| | | | | TCCCCTTCCTCGTTTGTGGCGCATGAGTATTTGCTGCTGTCTGGAGG |
| | | | | CAATTATTATATCAAGTATGCAAGGTACTTAATTAATTTAGTACTACT |
| | | | | CTAGGTTTGTATCAAACCTGACACAACGTGTATTAGTTCAACAATGT |
| | | | | GTATATGCTTTCCTAGGGTCCTTTTACTGATTACTACAACAGTGTGT |
| | | | | GCTTGCTGTCTAGATGCCAGGCATAGGAAGTCAATGGTTGCTTTAC |
| | | | | ACCATCTTGGAGTACTAATTTTTCAACTAGACTGAATTTTCTCGCAGT |
| | | | | AGAGTAACTTCCTGATGGCAATGGTAAGTGGTTGCATATCAGAGAT |
| | | | | ACGCTGCTGCTAGAGTAGGCGAGGTGTGCTTCTTGGAACTGGCTAG |
| | | | | GTGCGAGCTCGTGAGATGCTGTTGAGCCTAAAGCAATGATGCCTTC |
| | | | | TCTGGATTAGGTAAGTCTTTGGTCTATCTCATTCTCCTCTTTGTTATTT |
| | | | | TGAGTCAAGTACCTATGTGATATGGAATATATGGTATGAATTGCTCT |
| | | | | GTGTTAGGGTCTAATCAAGTCACTATGATGTTACTTTATGGTTAATT |
| | | | | ATGTATGCGTTGCTTTCTTTTCGAGTTATGATGTAAGTGATAAGTCA |
| | | | | TAGTCATAATGATCTCCATAAAATGGAAATATTATACTCCAGTTATC |
| | | | | TATTTTCGAATTTATTGGTTGCATGATGTTCCAGGGGTAGCATCTAC |
| | | | | ATGACTAGCACTCTTTTATTTGACTTTAGGCCATGCTCTCATTTCTCT |
| | | | | TGCAGTAGATAGAGGCACAAATCTATTACAGTCTGATGCATATTTTT |
| | | | | CTTTGGAAGCATGAATGTTTTGTGAATCGTGAAACTGTTATTTTGGC |
| | | | | CAGTCCCTGATTCTTGAATGGTTTTTATTATTGGCTTGACCAGTTAA |
| | | | | GTATGTACTTGTGCACTAATTTTCCTCTGCATTGTTGTAGTCATGCAA |
| | | | | GATAGATGGATGAGCATACGGCGGAGTCTTGTTCTTGGACCGGTG |
| | | | | GTGGTTGGTAGCTGGATGTTGTGACGCGTTGCTAGAGGGAGCGGT |
| | | | | GCACACGGGGACAAGTTGGTGGGTTGCCATAGTGTTGGTGGACAG |
| | | | | GAGAGCTCCTGATCATGCAACTACAAGAAGGGGACTTGTAGGCATA |
| | | | | TATGCCTGGAGGTTGGGAGCTGTTTCCAGCCAGAAGGACCGATAAT |
| | | | | GGATGTTGCTGCTGTAGGGTGGGTTTACATTCTGGGCTAGCTTTATT |
| | | | | TGCATCCCTGTGTCGTTCTTGTATTTGTGGTTTGAACCGTGGATTACT |
| | | | | TATGTCTCCTTCAAAGAATTTCATGTCTTTGTTGTTTCCGATTGAATT |
| | | | | ATATTTTGTTTAATTTTGTCAAACTGTTAGAAAATAAAAACTTACAAA |
| | | | | TGGGAAGAAAAAATAGATCGCAAAAAGACTAAGGCCCTAAAAAAT |
| | | | | GTATAGGTTGTTAATTGATTAAGGCCCGAAAGGTTAATCAGCTAAC |
| | | | | AAAGATGAAGCCCAGAAGATAAATGGACCGAACAATGGCTGCAAA |
| | | | | AATACAAAGGCTCAAAATTTAAATGGATCGGAAAAGACCAAGGCCT |
| | | | | AGAATAAAAAGTCTGGTATTAATGGGCTCGGCCTATGCAATCCACC |
| | | | | GAAATGGATCGGGCTGATTTTGGATTACGACGATTAGATTTCGTCA |
| | | | | TAATTTTGCCATGTTAGACTAGCCACGTAGGATCTGATGTGGCATG |
| | | | | GCCAAATCTCCAGTGACGATATTGGATCGTCATAGTGGTTACGACG |
| | | | | ATCCAATATCATGATAGACGACTATGACGATTCAAAGTAAAAGGTC |
| | | | | ATGTTGGTTGATTTTTGACGCTCCGTTTTTGACGATCCATTTTTTGTC |
| | | | | ATAGAATCGTCATAGATGAAATATTATGACGATTTAGAGACGAAAA |
| | | | | TGGAGTGTCGTAGGTCAACATATTTCTTGTAGTGGAGAGAGTCCTC |
| | | | | AGTTAGTTCTATCTAACTTGGAGAATTCCGATGACGTCTTCACCAGC |
| | | | | CCGACACCACCAAAGCCGGCCTTCTTGCCACCACTCATCTTTCTTTCG |
| | | | | GTTTGTGTCTTGTTCGTGTGCGGGTCTCGCGCTAGGATCCGACTCCA |
| | | | | AGTAAGAGCATCTCCAACAGGCGCACTAAATTTTGGCGCGCTAAAC |
| | | | | GTCGCTTCCGCCACGCTGTAAACATATAGCACGCGCTGCGCTGAAA |
| | | | | TTTGCCCCACCGGATGCTCTATTTTGCAGCGCGTGTTGGCGCGGTAA |
| | | | | AAAAGCTCCTCCGTCGGGTGCGCCAAAAATACAACGCGCGCGGGC |
| | | | | GCGGCAAAATACAGCGCGCGCGCAGCAAACAACTTTCTACACTACT |
| | | | | ATGCATTCAACAAGATCAAACACTCACATATAAATCATGAAACAAAT |
| | | | | GATCTACTATAGTTCAAATGGACACAAAGTGCAACACACATGACAT |
| | | | | AGTTCAAGAACGACACACAACATGACGTAGTTCAACAACGACACAC |
| | | | | AACATATGGTTCAAATGGACACAAAGTGCAACACACAATTTGCATA |
| | | | | TCACAAATGCATCTCACACTTCCGCATTTTCCAAGTCATCACCTTATT |
| | | | | TTGCTTCTTCTTCCTCGTCATCTTGGGTTGAAGGAGGAATAGTAGGA |
| | | | | TCCATGGAGGCCACGAATCCTCCCGGTGGCGCTCCCGTAGTCCCAT |
| | | | | ACACACCACGCACCGAGCCTCCCATAGTCCCTTTGAAGACTCCTCCA |
| | | | | TAACTTGGTTCTCCCATGCCGGCCATGCCTCCAAAGCCTCCCATGCC |
| | | | | GGCCATGCCTCCCATGCCGGCCATGCCTCCCATACTTCCTCCAAATA |
| | | | | TGGGCATGCCTCCTCCAAACATGCCGGTCGTGGGTGTGTTCATGTT |
| | | | | GGCTACCAACAATCTCTTCTTGGCCAACACTTCGTCGCGAGCAAGGT |
| | | | | TGATGTACTACTTTTGCCTCTCATCCATGTGGGAAGTATCCATCAAG |
| | | | | AAAAGCTTCCTCTCCTCCTCCACTAGGCGTAGATGCTCCTCGTTGGC |
| | | | | TTGCCTCTTCTCCTCCAAATCCAACTTCCTCTCCTCGTTGGCGGCAAG |
| | | | | CCTCTCCTCCAAAGCGGCTCTCCGAGCTTCCATTGCATCCATAGCCTC |
| | | | | TTTCTCCAAGTTCCTTGCCACCTTCCTATCTTCATTTGCTTGCAACCTT |
| | | | | GCATTTGCAATCCTTTCCATAGCAATGACAATGTCATCATCTCCGGC |
| | | | | CTTCTTTCCCTTCATATCTTTGGCGGTCTTCCTACCAAGCACATTCCTC |
| | | | | CGCCCATTATTGACCGAGTGACGAGTGGAGCGTCTCTTCTTGCCTTG |
| | | | | GTCACTTGAATCATCATCATCGATGATTGTTGCATCACCGGTTGCAT |
| | | | | TGGCTGCCATAGTTGCCACATTCAACTTCCCGCGGGTCTTCATCTTTT |
| | | | | CTTCATTCCCTAGCACTTCATAGCAACGATGCAAGGTGAATGGCTTG |
| | | | | CCAAGATTCTTGTTGCCTTTCTTGTTCTTCTTTCCCACATCCCCAAACA |
| | | | | ATCCTTGAGCCATATAGTTCTACAAAGCAAGCAAAAGAGAATATAT |
| | | | | GAGCTATATGAACTACAACCTCGTATCCTTCACATATGAGCCATATG |
| | | | | GTCAACATAGTAGTAGAATTGCTTACCCTATCAATCTCATTTGTGCC |
| | | | | ACTTGGGTTAATGACATCAACGTTGGCTTGCATGCCCGCCCATTTTT |
| | | | | GGCAATCGGTGTTGATGCCGGACCAACGAGACCGAAGAGAACGCA |
| | | | | TGGTTCGCTCGTTCCCACTTGTGTTGTTGGCGTCGAGGTACTCCTTC |
| | | | | ATCCTCATCCAGTATGTGTATCTTGTTTGATCGGCACCGGTTGTTGG |
| | | | | ATCCATTCCAATTGTCAACCATGTATTGCAAAGCAACTTGTCCTCCG |
| | | | | CTATGGTGTAGTTCGCCGACCGACCGGGATGGCGAGGTTCAATCAA |
| | | | | CCCTTCTCCTTCCTCATCGATATCCTCATATTCCTCCCATCCCTTAATG |
| | | | | GTTTCATCATGCATAAACGAAGATCCAACATTCATTGCCTCCATGAA |
| | | | | AGACTCATCATCGACTCTACATTGCAATGAAGTTCATTATTCTGTGG |
| | | | | CTATGTATGCATCTAAACTAAAATTTGGATGAAAAGAAGTGTTTTTT |
| | | | | ACCTCTCCGGCATTTTCTCATACACCGTATGTGCGCCGGACGGAGGC |
| | | | | GCCAGCGGCGGCTGGTTCGTCGGTGGAGGAGGCGGCGGAGGCTG |
| | | | | CGCGCGGCGGGTCGCGGTCGCCTTCACTTTCTTCGGCGGCGCAAGG |
| | | | | GAGGCGACGTCCGCAGCTACATACGAGCGTTTGGACGACGACGCC |
| | | | | TTCCTCCTCGGCGGCTCCCGCGCCTTGCCGGGGGCCATCACAGTGG |
| | | | | CCAGCTGCGCAACGGCGGCTGTGTGCAGCGTCGCGCGCAGCGGGA |
| | | | | CGAAGAGAGCACGGGCATCAGCGGTTGTGTTGCCGGCGTCGGTGC |
| | | | | CACCGCTAGGGTTTGGCGCATGGGGCGGCGGCGCGACAGAGGCG |
| | | | | GCAGCGGTGGGTGGAATGGAGTATGGAGGGGTCGGTGGGGTGCC |
| | | | | GACGGGACCGTCCATCGCCGGGATTGTGTCGACGGCCGCGCGGAG |
| | | | | GCGAGGGATTGGGCGGTGCGGTGGCGAGGCGCGGGGGGAAGTTT |
| | | | | CAGCGCGGGATTTGTTCGCGTGCGTCGAGCGATGACGCGTGCTGTA |
| | | | | GCCGGCGTCCAAAGTTTAGCGCTTGGGATAGGGCAAACCGGTCCG |
| | | | | CGTCCCAAATTTTTTTTTACAGCGTTGTAGCATCTGCCGGAGGACCA |
| | | | | ATTTTGCGCTCTCGCGCTGGAAACGACGGTTTATATAGGGCGCAAC |
| | | | | ATATATAGCGCGTGTTGAAGATGCTCTAAGACTGCTCATAGTGGGA |
| | | | | GTAACATTGCTCGTAACGTCACACATCTCAAGGTGTTTTGGTGACAT |
| | | | | GGCATGTCAATAAATTAAGAAAGAGAGTGAAGTGGTAACTAGCTAT |
| | | | | GTTACCNNNACATCACACACCTCAAGGCAAGATAAGTTTACAACAT |
| | | | | GTAATAAATAACGCAATGCATGACACAACATATAAGTTACTACCCAC |
| | | | | TCTATGATAGAGTTTGGCTCTGGTGGTTAGGTCCCTTGTGGTGGAA |
| | | | | CCAGCCCACCCAGGTTCAAGTCCTAGATTTGGTATGGATGTTTGCAT |
| | | | | TTACCTGGATTTATTTCAGAATTTAATCGGCGCTATACTTTCAGTGGT |
| | | | | AGGTGATGTGCCCGTCAATAGCGAGGCGCCAGTGGTGACTTCGTCA |
| | | | | ACCTCAAGATATGGTGGCTCAGTCCCTCGAAGGTGCTCATAGGAGT |
| | | | | AGGGTATGCGTGCGTGCGTTCGTACGGTGTTTGTACGTGCGTATTT |
| | | | | GTGAGTTCTCGTCTGCCTTATACTGTGTTCTAAAAAAAATTCAGTTTT |
| | | | | TATCTTGCCTCGAGAGCCGACTTCCAATCTGGACCCGTTATAGGTGG |
| | | | | ACCCTACGTGTCAATGCCAACACGGCTTTGATTCACGCGCCGCTGCA |
| | | | | ATCTTCATTGTATATCCTTCTATATACCGACGCAGGTTGTTCAAAAA |
| | | | | GAAAATACCGACGCAGGTGGTGAACAGCCTAGCAAATTGTCACCG |
| | | | | ACAGATGGGTCCAAACCAGGATAAGGCCCACATGTCATTGCGTGTA |
| | | | | GTGGCATAACCGGGTTGGCCCACCCCACCCCCAGCCCCATCCCATCT |
| | | | | GAACCACACATCTTGCCACGCCACGCGACTGCACCAAAGACAAAAC |
| | | | | ACGCTCGCACCACCACTCCATCCTCCTCTTTCTCCCTCGCCCAAACCC |
| | | | | TCGCCGCCGCCTTCGCGACATCCGCCGCCGCCATGGCCACTGCCACT |
| | | | | TCCACAGCCGTCGCCTTCTCGGGTGCCACCGCCGCCTTGCCCAAACC |
| | | | | ACGCACTCTCCGGCGTTACCAACTGCTCTCCTCACGCCGCGCCCTCA |
| | | | | CCGCCCCCATCAGGTGCTCCGCGGTGTCCCCTTCGCCTTCGCCCGCC |
| | | | | CCTCCCGCCACCGCGCTCCGTCCATGGGGCCCATCCGAGCCCCGCA |
| | | | | AGGGCGCCGACATCCTCGTCGAGGCCCTCGAGCGCTGCGGCATCA |
| | | | | GCGACGTCTTCGCCTACCCGGGCGGCGCCTCAATGGAGATCCACCA |
| | | | | GGCGCTCACGCGCTCGCCGCTCATCACCAACCACCTCTTCCGCCACG |
| | | | | AGCAGGGGGAGGCCTTCGCGGCGTCCGGGTACGCGCGCGCGTCCG |
| | | | | GCCGCGTCGGGGTCTGCGTCGCCACCTCCGGCCCGGGGGCCACCA |
| | | | | ACCTCGTCTCCGCGCTCGCCGACGCCCTCCTCGACTCCATCCCGATG |
| | | | | GTGGCCATCACGGGGCAGGTCCCGCGCCGCATGATCGGCACGGAC |
| | | | | GCCTTCCAGGAGACGCCCATCGTCGAGGTCACCCGCTCCATCACCA |
| | | | | AGCACAACTACCTCGTCCTCGATGTCGAGGACATCCCCCGCGTCATC |
| | | | | CAGGAAGCCTTCTTCCTCGCCTCCTCTGGCCGCCCGGGCCCGGTGCT |
| | | | | CGTCGACATCCCCAAGGACATCCAGCAGCAGATGGCGGTGCCCGTC |
| | | | | TGGGACGCGCCCATGAGTCTGCCAGGCTACATTGCGCGCCTGCCTA |
| | | | | AGCCACCGGCTACTGAACTGCTCGAGCAGGTTCTGCGTCTGGTTGG |
| | | | | TGAGGCAAGACGCCCAATTCTCTATGTTGGCGGTGGCTGCTCTGCA |
| | | | | TCCGGAGAGGAGCTGCGCCGCTTTGTTGAGCTCACTGGGATCCCAG |
| | | | | TTACAACTACCCTCATGGGTCTTGGCAACTTCCCCAGCGACGACCCG |
| | | | | CTGTCTCTGCGTATGCTTGGGATGCATGGCACTGTCTACGCAAACTA |
| | | | | CGCCGTAGATAAGGCTGACCTGTTGCTTGCGTTTGGCGTGAGGTTT |
| | | | | GATGATCGCGTCACTGGGAAAATCGAGGCTTTTGCGAGCAGGTCCA |
| | | | | AGATTGTGCACATTGACATTGATCCAGCTGAGATTGGCAAGAACAA |
| | | | | GCAGCCGCATGTCTCCATTTGTGCAGATGTCAAGCTCGCTTTGCAGG |
| | | | | GCCTGAATGCTCTGCTAACTGGGACCAAAGCACAAAAGAGTTTCGA |
| | | | | TTTTGGTTCGTGGCATGACGAGTTGGAGCAGCAGAAAAGGGAGTTT |
| | | | | CCTCTGGGATACAAAACTTTCGGGGAGGCCATCCCACCGCAATATG |
| | | | | CTATCCAGGTACTGGATGAGCTCACCAAAGGTGAGGCCATCATTGC |
| | | | | CACTGGTGTTGGGCAGCACCAGATGTGGGCGGCTCAGTATTACACC |
| | | | | TACAAGCGCCCACGGCAGTGGCTGTCTTCGGCTGGTCTCGGGGCGA |
| | | | | TGGGGTTTGGGCTGCCAGCTGCAGCTGGCGCCGCTGTGGCTAACCC |
| | | | | AGGTGTCACAGTTGTTGACATTGATGGGGATGGTAGCTTCCTCATG |
| | | | | AACATTCAGGAGTTGGCGCTGATTCGCATTGAGAACCTCCCAGTTA |
| | | | | AGGTGATGATATTGAACAACCAACATCTTGGAATGGTGGTGCAGTG |
| | | | | GGAGGACAGGTTTTACAAGGCCAATCGGGCGCATACATACCTTGG |
| | | | | GAACCCAGAAAATGAGAGTGAGATATATCCAGATTTTGTGACCATT |
| | | | | GCTAAAGGGTTCAATGTTCCTGCAGTTCGGGTGACAAAGAGGAGT |
| | | | | GAAGTCCGTGCAGCAATCAAGAAGATGCTTGAGACTCCTGGGCCAT |
| | | | | ACTTGTTGGATATCATCGTCCCTCACCAGGAGCATGTGCTGCCTATG |
| | | | | ATCCCTAGCGGTGGTGCTTTTAAGGACATTATCATGGAAGGTGATG |
| | | | | GCAGGATTGCGTATTAATCGGAACTTCTGCAAGAGCTCGACCTACA |
| | | | | AGACCTATAAGTGGAATATGCCTGATCAGCATGATGCTGGTGTATG |
| | | | | TTATATCCATGTGTTCGCTAATTTGCTTGTTTGATGAGCTTGGTTTGC |
| | | | | TAGTCTTACCTAGCTCTGAACCTTCTAGGTTTTCTAGTCTGTTCTTTTC |
| | | | | CGTAGGCATATGCTGTCATAAGAGATCATGCAAGTTTCTTGTCCTAC |
| | | | | ATATCAATAATAAGTACTTTCATGGAATAATTCTCAGTATTTTAGTTC |
| | | | | CAAGTCTTCTCGCCATGTTTGGTTACGTACTAAGTGCATGTGTAAAT |
| | | | | GTATGTCGCCCCGATGGGGGATCAACGACAAGTTCTGGACTGGGA |
| | | | | AATCAGACTGAGTTTGGGTGGAAGGAGAACATACATATGTTCATAT |
| | | | | CATCGTTCCTTTCGTTCAGTAACCATCGACCCACAAGCCATCCTAACT |
| | | | | AACAGACTACGAGACACAGAATTTGAACAATATATGCTACTTGTTCA |
| | | | | CTTGCGTTTGAGGTACGTGATGAAGAATCTCTTGGGAATATGGGTT |
| | | | | TTATTGTATATAAAAGAAGACAATCTTTCTGTGAGATAGAGAATCTT |
| | | | | GAGAATATCCTCATAGATTTTTCAAGGATACTTTTGGATATCATGTA |
| | | | | TTACCTGTAGGCATGCAAGTGCCTGGTGAGTATGCTTAAACCATAA |
| | | | | CAGTTTTAATTTATCATGACAGATCTCCACAAAATAGCCAGAATAGT |
| | | | | TGTGCCTAAAATAAGTAATGTTTTCTTTGTGGCAAGCACAGATGAA |
| | | | | GGTGCCCAACTTTGTTTCACTTTTAGCACATATTTCTCCTTTATTTTGT |
| | | | | AGTCCTCTATTTCTTATTCTTAGGTCTTAACAGATCTTTTGCTAATGG |
| | | | | TCTCTTCGATTTTGAGCTCCTCTTTCTATTTCATAGGATAATATCTTA |
| | | | | GGCTAATGTAATACTGGCCTTGATATGTTTGTGCGTGTGTCTTCTGG |
| | | | | TCTTGCTTACTCAAAAGTATTCGTACCCACGGGTGAATCCAGGAGC |
| | | | | GATGTTGATGCATTCAGCTTTTGCGGATTGATGTTGGTTAGATGGAT |
| | | | | CTGGATGGACCTATGTTAGTTTTAGCTCTGCATGAGTGGTTACCTTA |
| | | | | TATTCCCAAGCTTCATGTTCAGTGGACCTTTTTTTTTTGACCGAATGT |
| | | | | TCAGTGGACCTTGGTGGAGACTCATGTAGCCTCTGTACATTCGTTCT |
| | | | | TGGTATGTGAATTCTTAAATATATTTATATATGAATGCTAAGCTCCAT |
| | | | | GGTGAAGCACGATTCTGTCTTTGATTACTTCTTCGGTGGGGCTGTTG |
| | | | | TTCTCTGTTAATAAAAAGTCTTCACATGTAGCCTACCTGTAAGATATT |
| | | | | GATTGGTGTTGACTGTGCAGGAGCTTAGAGTTTAGGAACCAAGTGC |
| | | | | AAACTTTATTTATAAAACCAAGAATATTAAATAAGGTATTTTTTTTTA |
| | | | | CAAATTAGCATCCGTATCTATCTGGTGTAACAATCGAAGAGAGGTA |
| | | | | TTGTTGTTTTTGTTAAGTTCATACATTTACGTGTTACTTAGATTCACG |
| | | | | CAAATGTACATACTCCATCTGATTGTATCATTTATCGTTTTTGTTTGG |
| | | | | GGTCGCGCAGCTAGCAAGCTGCGCCTTCCTTACATCTGTTGCTCTTG |
| | | | | GCATAACGGTGTTGGTTATTGTAATGTATTTTCCTATTTTCCTGATTG |
| | | | | TATAAGCATTTGGTACTCCTTTCATGATTTTGTTTGCTCTTATCCTAAT |
| | | | | TTCTCTCTTATCTGCTTCGTTTTGTAAAAATTTAAAAACATATTATTAT |
| | | | | TTTCCTGCCTGCTTTTTATTGTCGTTATACGAAATGTAAATAGTGGTG |
| | | | | AATTCCACGGGTACAACTCTTAATCTAGTATCTTTACAGCTGTAAGA |
| | | | | ACATTGCAAGGATTGAATTTCTCTACGGAAATAAAGAATTTTTGAAA |
| | | | | TTTTCAGAATTTCGGGAAGTCACATCAATGATTTTGTCAACCTATTA |
| | | | | ATGAAACTTTCAGGAGTGTACTGTCCTTCATGGTTTCAGATATTTCC |
| | | | | GAACAAGTAAAATATCATGACAGCGGAAGGCTCCCTTGCTGTGCGT |
| | | | | TGCCCTCTGAACTTGTAAGAACCGTATTTAGCATCTTCCTTGCAAGT |
| | | | | GCAGCAATTGATCTCCAATAGCAGCGAGTTAACCATTGACACGGCA |
| | | | | TCAGAAGTCCAAAACTCATAAGTACTGTACTTTTTTTTTTGTAGAAAT |
| | | | | GGCATGCATCCGAGGGTGGATGATGAATTGTACATAGCTTACATTT |
| | | | | TCCTTATTATGTCATGCAGTGCCAACATTCAGAGAAGGGGCTCTATC |
| | | | | ATCATTACGCAAAGCTAATAACTAATAAGCTCCATTTGGTACAGATA |
| | | | | GCCAATGATCAAGCGTCCACGGGATGGGATCTGATTTGTGATAGCA |
| | | | | CATGAGTTGTCTCATTAGAAAATTCGCCACAACTCCCTAGTTTTCCTT |
| | | | | TTCACATCATTTTAGTGTGTGCTGGTCCGGTAGCTCCATAAACAAAG |
| | | | | CGATCATGGACACCGCAAAAATCACAGCTAACCACAGCTTCAAAGA |
| | | | | TCGTGGGAGCCCCCACTGAATCATAATTACATCTACGCTACAGCCTG |
| | | | | AACAGGGTGTCATATACTCGTATCCTGCTGTTTAGGCGCAGCCCAA |
| | | | | AGAACCAAACATCCTTCACAGCTGCAAAAAAGAGATTTGATTTTACT |
| | | | | GAAACCATGTCTACAGAGACATGTTTATGGGTTGCTGAATGACAGA |
| | | | | TCCACTTGGCATGTTTCAAACCCTTATTTATGTATTTACAAACAATAA |
| | | | | AACCTCAGAACTAGGCCAAAACTTCTGTGAGGAATATATCTACAGC |
| | | | | TGTATGTGTTTGACATGATCTATGGTTTTAAGAGGTTCATGGAAACA |
| | | | | TAACAATCATTGTGATAGCTGATAACTGGCAGACAAAAAAAGGGTG |
| | | | | AAAGACCGATTTAACAAGTTGTGAGCAGATCGCAGGCGAGCTCAA |
| | | | | AAGAAGTACAAGCCAGCTCGGGGCACATGTAAAGAGGTCTGATAG |
| | | | | GAGATGATTCAGTACGCATCACCGCAGACGAACTAGATTTACATGA |
| | | | | TTTAACAGTCTAGTAGGAGCATTTGGTACAAAGATGGACCACCCCA |
| | | | | AACCTGGCACCCCTTGACATTCATTCAAGAACTACCTACCCAGAATT |
| | | | | GATAATACCCGTCACCGAAATCTCTTATCCTTTTGGAGGAGGATATT |
| | | | | TGGGTTCCTCTTAGATCCTGTTAGCTCGCCCCATCTCGTCCCTGGTCC |
| | | | | ATGAACGCGTGAAGAAATGCTCCAGAGGGTGTCTCCTTGCTGGCCA |
| | | | | GCCGCATCTTTCGTTGGCTTTGAAATAGCTTTGGATTTCATCAGAGG |
| | | | | ATTCTTGTTGCCTTTACCCATGCCAGCTCCTAGCAGCCATCTTGAGCC |
| | | | | AGCTTGCTGCTGTGTTTGATTACCCCATGGTTTTGTCTTCTCAGGCTC |
| | | | | GCTCTTAAAGCCAGCTACATGCACTTCTGTGACTTTAAACTGAGGGG |
| | | | | CAGAATCTTCCTCCTCGATCTTTTCTTCAGCAACCAATGCCTTATCTA |
| | | | | GAATCTCCTCAGTCTTGGGCTCCTCATAATATTCCTCACTGTTACCTT |
| | | | | TCTCCGAAACAGTGTTGTATATCTTGGGCTTTGGGGGAATAAAAAC |
| | | | | CCTCTCCACTTGAATCAGAGAAAGCATCGGTGTGCCAACTGGCTCAT |
| | | | | AGTTACGTAGCGGGTCACGCAACTGAACCATAAGAGCAACTGTGAA |
| | | | | GTTGTTCCCCAACAAACCCCATCTTCTACCAGATCTTCTGCTTTTCTT |
| | | | | GTCCGCATTCTGGTTTTCAGCAAGTAGGTCCATTGATTTGGCATGGT |
| | | | | GGGCAGCAAGTATTTTCGATGTACGGTCACTGAACTGTTCCTCTTCA |
| | | | | TCGACCACTCCAGAATCAAGTCTCATCCACTCATCTAGAGTGATTGA |
| | | | | TAATCCCATTAGTCCATCAACATCACCACCACTTTGTTTAACATCCAG |
| | | | | AAGCTGCAATCCCGCAGTCCCTTCTAACCCAAGGGTCCGTGTATTCT |
| | | | | CTGCGCATTTTCCTTGCAGAGATGAAATCTCACCAACAGGGTGGGC |
| | | | | ACTGATATTGGAGGGTGCCTCTTCTTCAGACATGCCAGATTGTATCC |
| | | | | TCAGACCCTCAATAGAAAGGGCTTCAATTTTTTCCATAGCTAATGGG |
| | | | | GCAAGGTCCTCAAGTGAAACATATTCCGAAGCATTTATCCCACCCAA |
| | | | | TGATGATGACAGATCAGCACCTCTTCTTTTCTTCTTCTTTCCCAAGGG |
| | | | | AGCATCACTGACCCCTCCTGCTAAAGCTTCCATGCTATGGTTCTCCA |
| | | | | ATAGGTCGTATCTGCATTTGTTAGAGCAATATGTTTTAGCCAGGGTA |
| | | | | AATGGTTAAGTAGGAAGTCATGAGCAAGCATGACAAGAAAGATTT |
| | | | | CTAACCTTCCAGCAGACTCTAGAGCAGGACAAGCCCCCCAGGCGAG |
| | | | | CTGCTGCATCATTTTGCCATTCACATCTTCCAAGGGCATAAGTTTGTT |
| | | | | TGCTTGCATTGATAGCTTTTCGATTCCAACTGAAGCTAGACCGTGCA |
| | | | | ATATCTCCATAATTCCAGATCCCATTTCTGCTGGTAGCACGATTGGA |
| | | | | GAAGAAGCCTGCATGACCAGGCTACAGTTGTTCTTTGCATTCTTGAA |
| | | | | AAGAGCTGGATTCATCGACCGCAGAAATCCTCCATCTTCTGTCTGAA |
| | | | | TAAATGGGCCCAAACCATCAGCCAAAGGCGGCAGCTCGAGGGGCA |
| | | | | GCTCAGGTGGTATGTCAATGGGGCTACCAAACCCACTTCTAGTTCCA |
| | | | | CGTGGGGAAGATTGGAAGGACTTCTCATTTAGCCCGAACTGACGCA |
| | | | | TCAAAGCTTCAGCTTCCTGGTCTTCCAGTGACTTGGCTGTAAATGTG |
| | | | | GCGTCTATGGGCGGAGCTGCACTCTGCAGCTCAAGCTCAGCCTCGT |
| | | | | GTATGATTGTGGAGAGATCAAATTCCTCTGCAAAGTCGTCACAACT |
| | | | | AGCTTCGTCCGCTCCATCTTCGAAATCCAAACCTAGAATACAGTCCC |
| | | | | CAGATTCCAGAGCTTCTTTTTCGAATTGCTTCCAAAGCTTCTCCCTCG |
| | | | | GCGACTCTGAATCACTGTCTGTGGTTGGCCCAAATGGGCTATGCTC |
| | | | | GATCCCAAGCATTTCCAAAAACTCGCTAGCAACAAAATCAGACGAA |
| | | | | GCATCCACGCTGCGTGATCTGCTCTTCCTGCTGGCGGAATTGTAACC |
| | | | | GTCTTCCGCGCCCATGCAGCTCATTCGCCTAGACAGCTTATCGTCCA |
| | | | | CGGTTGGCGAATCAAATTCCTCTGGCTCCACGATTGCGAATTTGTTG |
| | | | | AACAAGGACTCCAGATCCTCCAGCTCTGCATCCTCTGCCAGCTGACC |
| | | | | ATCTTCTTCCAATGATGAAGTAGGGAGCAAGGCTGCTTCGACCGGC |
| | | | | GCATCCTGCTCGTCTCCCACATCGTCCGTTTCAGGAGCAACATCGCT |
| | | | | GGGCTCCTCTTGCAGCTTCACTTCAACGGTGCCGTCTTTAGCAGGAT |
| | | | | CGTCGCTTAAAAATGCAGGTTTGGTCGTTGCCTCTTCATTAGCTTCC |
| | | | | CCATTAAAATTCTCTGCACGGTCAGCCACATAGTCAGCCTTGGCAGG |
| | | | | TTTGAGCTGCTCTAGGTCCTGGAGGGCGACCTCAACTCCCTGCTCAA |
| | | | | CCACACTGAACTCTGCGCTATAGCAATCGCCATCTGGATGCGCAAA |
| | | | | GTCCCCCTCCCCCTTCTTCACCTCCACCGACGTGCAATGCTTTGACTC |
| | | | | CGGCGAGCCATCCTCCTCGGGTTCTACTGCTGCCTTTTTTGTGGCAT |
| | | | | CAAGACCTGCGTCACCAGCAAAGGCCAAGGCTTTGGCAGGCCTGGT |
| | | | | GGTGCTGGGCAGAACCTCGTGCAGCACCCTGACGACGTCCCGGGTC |
| | | | | CGTGCAGGCACGGGCGTGGGCGCCTGCCGCGCCACGGAGCCCCGCC |
| 45 | Lolium | gDNA | 206 | GGGTGACAAAGAGGAGTGAAGTCCGTGCAGCAATCAAGAAGATGC |
| | multiflorum | Contig | | TTGAGACCCCTGGGCCATACTTGTTGGATATCATCGTCCCTCACCAG |
| | | | | GAGCATGTGCTTCCTATGATCCCTAGCGGTGGTGCTTTTAAGGACAT |
| | | | | TATCATGGAAGGTGATGGCAGGATTGCGTATTAATCGGGACTTCTG |
| | | | | CAAGAGCTCCACCTACAAGAC |
| 1692 | Abutilon | cDNA | 1599 | CATGGCGGCTCTCTCGACTCCTCGCCTACCAGTTCACTGCTTGAAGC |
| | theophrasti | Contig | | CCGAGTCAGACTCAGCTCGGAGACCCATTTCTTTCCCTGTAAAGATA |
| | | | | CGAAGACCCATCAGCCATGTCCCCAAGAAACTCGTGCTTTCTCCCAG |
| | | | | GAGCGTCGACGATAAGATCTCTGGCAACAACATCCTTTCCAACGGC |
| | | | | CCCGTTCCTTCAACTCCCACTCGTTCAAAGGTGAGAAGGCATACGAT |
| | | | | TTCTGTGTTTGTTGGAGATGAAAGTGGAATGATCAATAGGATTGCT |
| | | | | GGAGTTTTTGCAAGGAGAGGGTATAACATTGAGTCCCTTGCGGTTG |
| | | | | GTTTGAACAAAGATAAGGCACTCTTCACCATAGTTGTCTCTGGTACT |
| | | | | GAAAGAGTGCTTCAGCAAGTTGTGGAGCAGTTACAAAAGCTTGTGA |
| | | | | ATGTTTGGAAGGTTGAAGATCTCTCTAATGAGCCTCAGGTTGAACG |
| | | | | TGAGCTTATGCTGATAAAAGTGAATGCGGATCCAAAGTTTAGAGCT |
| | | | | GAGATCATGTGGTTAGTGGACATCTTCAGGGCAAAGATTGTGGACA |
| | | | | TCTCAGAACACTCACTAACTATTGAGGTAACAGGAGATCCTGGGAA |
| | | | | GATGGTTGCTGTGCAAAGAAATTTAAGCAAGTTTGGGATCAAAGAA |
| | | | | ATTGCTAGAACAGGAAAGATTGCCCTTAGAAGGGAAAAAATGGGT |
| | | | | GCATCTGCTCCATTCTGGCAATTTTCAGCAGCTTCATATCCTGATCTT |
| | | | | GAAGAAACAATACCTGATAACACTCTTGCAGGGGCCAGAGATAGA |
| | | | | ACAGTAGTTAGCGAGGCTGATGTTTCTGGAGGGGGGGATGTTTATC |
| | | | | CAGTGGAGTCACCTGATGGTTTTACGATCAATCAAGTTCTTGATGCT |
| | | | | CATTGGGGTGTTCTCGTTGATGATACAAGTGGACATCAATCTCATAC |
| | | | | TTTATCCATGCTTGTAAATGACTGTCCGGGAGTTCTAAACCTTGTCA |
| | | | | CAGGTGTTTTCGCTCGAAGAGGCTATAATCTTCAGAGTTTGGCTGTT |
| | | | | GGACATGCAGAAGTTGAGGGGCGCTCTCGCATTACCACTGTTGTTC |
| | | | | CGGGTACAGATGAATCAATTAGCAAGTTAGTGCAGCAACTATATAA |
| | | | | GCTCGTAGATATGCATGAGGTACAAGATCTTACACCCCTGCCATTTG |
| | | | | CTGAACGAGAATTAATGTTGATAAAGATTGCCGTGAATGCCGCTGC |
| | | | | TCGGCGAGATGTCCTTGACATTGCCACCATTTTTAGGGCCAAGGCT |
| | | | | GTTGATGTTTCGGACCACACTGTCACTCTCGAGCTTACAGGAGATCT |
| | | | | AGACAAGATGGTTGCGCTGCAGAGATTGTTGGAGCCTTATGGTATT |
| | | | | TGTGAGGTTGCTCGAACTGGACGTGTAGCGTTGGTGAGAGAGTCT |
| | | | | GGTGTCGACTCCAAATATCTACGAGGATATTCTTTTCCACTTTAAGTT |
| | | | | CCAAGTAGTATTTCTAAGGTATTGGTGTGAGACTATTTTTGCGTTGT |
| | | | | TTTGTTTTGATTACCAAACAGATAAGTTTAGATACTTCAGAGCTTTG |
| | | | | ATAATCATAAAGTTTTGGGAAGTTTGAATAATCAAAGCTCCACTGAA |
| | | | | ATATATTCTTGTTATGTGTA |
| 1693 | Amaranthus | cDNA | 714 | ACTCGCTGTTGGATTGAACAAGGACAAAGCTCTCTTTACTATTGTAG |
| | graecizans | Contig | | TTTCTGGAACGGATAATGTGTTGCAGCAAGTGATGGAACAACTTCA |
| | | | | AAAGCTTGTCAATGTTTTGAAGGTTGAAGATATATCCAAGGAGCCT |
| | | | | CAAGTAGAACGTGAATTGATGCTTGTAAAAGTTGGAGCTGATCGGA |
| | | | | ATAACCGTGCTGAGTTGATGTGGTTGGTGGGCATCTTTCGTGCCAA |
| | | | | AATAGTGGACATATCGGAAGAGTATCTTTCAATAGAGGTCACTGGA |
| | | | | GATCCAGGAAAGATGGTTGCTGTCCTCAGAAACCTAAGCAAGTTTG |
| | | | | GCATCAAAGAAATTGCTCGTACCGGAAAGATTGCTCTAAGAAGGGA |
| | | | | AAAATTGGGTGAGTCTGCTCCTTTCTGGCGTTTTTCTGCTGCTTCTTA |
| | | | | TCCTGATCTTGAAGAAGCTATCCCTATGGATGCTCTTTCTGGAGTTT |
| | | | | CAAAAAGAGCAGCTGCTGCTGGATCATCAGATTCGTCTGTGGAGGG |
| | | | | TGATGTTTATCCTGTGGAGCCGTTTGATGGTTTCTCCCCTCCAATCTT |
| | | | | AGATGCTCATTGGGGTATTTTGAATGAAGAAGATACTAGTGGGATG |
| | | | | CGATCACACACTCTATCTATTCTTGTCAATGACAAACCCGGGGTCCT |
| | | | | TAATGTTGTTACGGGGGTTTTTGCTCGAAGGGGTTATAACATTCAG |
| | | | | AGTTTAGCTGTGGGTCA |
| 1694 | Amaranthus | cDNA | 632 | GTGTCGACTCACCTTTCAACGAGTTTTAACTCCATTCCGAAAAGCAA |
| | hybridus | Contig | | TAGATTGAACCACCAAACTGCAAACGATTAGGGTTCTCCTTGAAACC |
| | | | | CCATTCTCTGGGTTTTAAGTTTAACTCCAATAGTGACAGGAATTCGG |
| | | | | AGTTTGATAAACTGGTTGTATCTGCAAGCAATGTTGATCAACTGGG |
| | | | | AAATCAAAGTAACTTATCCTTTAATCCCCCTTCTCCCTCTCGATCAAA |
| | | | | GGAGAGACGACATACAATATCAGTATTTGTGGGGGATGAAAGTGG |
| | | | | AATGATTAATCGAATAGCAGGGGTTTTTGCCAGAAGAGGTTATAAT |
| | | | | ATCGAATCACTCGCTGTTGGATTGAACAAGGACAAAGCTCTCTTCAC |
| | | | | TATTGTAGTTTCTGGAACGGATAATGTGTTGCAGCAAGTGATGGAA |
| | | | | CAGCTTCAAAAGCTTGTCAATGTTTTGAAGGTTGAAGATATATCCAA |
| | | | | GGAGCCTCAAGTAGAACGTGAATTGATGCTTGTAAAAGTTGGAGCT |
| | | | | GATCGGAATAACCGTGCTGAGCTGATGTGGTTGGTGGACATCTTTC |
| | | | | GTGCCAAAATTGTGGACATATCGGAAGAGTATCTTTCAATAGAGGT |
| | | | | CACTGGAGATCCAGGAAAGATGGTTGCT |
| 1695 | Amaranthus | cDNA | 495 | AAAGAAATTGCAAGGACCGGTAAGATTGCTCTAAGGCGAGAAAGA |
| | hybridus | Contig | | TGGGTCAGACGGCTCCTTTTTGGAGATTCTCTGCTGCTTCTTATCCA |
| | | | | GATCTACAAGAAAAGGCTGTTGATGATCTGGCCAGGCCTACGAAAC |
| | | | | GGAGCATCAATGGTGATTCTGGCTCATCTTCAAGTGGTGATGTTTAT |
| | | | | CCGGTGGAACCTTATGATGGTTCGATGGTAAATCAAGTACTTGATG |
| | | | | CTCACTGGGGCGTACTTTATGACGGTGATTCCAGTGGTCTCCGGTC |
| | | | | ACATACGCTGTCCATGCTGGTAAATAATGCTCCCGGAGTTCTTAACA |
| | | | | CTGTTACAGGAGTAATTTCTCGTAGGGGTTATAACATTCAGAGTCTT |
| | | | | GCTGTAGGCCCTGCTGAAAAGGAGGGTCTTTCTCGTATCACAACTG |
| | | | | TCATTCCTGGAAACGACGAGTCGATTGGAAAATTGGTTCAGCAATT |
| | | | | CAACAAGTTAGTAGACCTTCATGAGATTCAGG |
| 1696 | Amaranthus | cDNA | 1326 | GCAATAGATTGAACCACCAAACTGCAAAACGATTAGGGTTCTCCTT |
| | lividus | Contig | | GAAACCCCATTCTCTGGGTTTTAAGTTTAACTCCAATAGTGACAGGA |
| | | | | ATTCGGAGTTTGATAAACTGGTTGTGTCTGCAAGCAATGTTGATCAA |
| | | | | CTGGGAAATCAAAGTAACTTATCCTTTAATCCCCCTTCTCCCTCTCGA |
| | | | | TCAAAGGAGAGACGACATACAATATCAGTATTTGTGGGGGATGAA |
| | | | | AGTGGAATGATTAATCGAATAGCAGGGGTTTTTGCCAGAAGAGGTT |
| | | | | ATAATATCGAATCACTCGCTGTTGGATTGAACAAGGACAAAGCTCT |
| | | | | CTTCACTATTGTAGTTTCTGGAACGGATAATGTGTTGCAGCAAGTGA |
| | | | | TGGAACAGCTTCAAAAGCTTGTCAATGTTTTGAAGGTTGAAGATAT |
| | | | | ATCCAAGGAGCCTCAAGTAGAACGTGAATTGATGCTTGTAAAAGTT |
| | | | | GGAGCTGATCGGAATAACCGTGCTGAGCTGATGTGGTTGGTGGAC |
| | | | | ATCTTTCGTGCCAAAATTGTGGACATATCGGAAGAGTATCTTTCAAT |
| | | | | AGAGGTCACTGGAGATCCAGGAAAGATGGTTGCTGTCCTTAGAAAC |
| | | | | CTAAGCAAGTTTGGCATCAAAGAAATTGCTCGTACCGGAAAGATTG |
| | | | | CTCTAAGAAGGGAAAAATTGGGCGAGTCTGCTCCTTTCTGGCGTTTT |
| | | | | TCTGCTGTTTCTTATCCTGATCTTGAAGAAGCTATCCCTATGGATGCT |
| | | | | CTTTCTGGAGTTTCAAAAGGGGCAGCTGCTGCTGGATCATCGGATT |
| | | | | TGTCTGTGGAGGGTGATGTTTATCCTGTGGAGCCGTTTGATGGTTTC |
| | | | | TCCCTTCCAATCTTAGATGCTCATTGGGGTATTTTGAACGAAGAAGA |
| | | | | TACTAGTGGGATGCGGTCACACACTCTATCTATTCTTGTTAATGACA |
| | | | | AACCTGGGGTCCTTAATGTTGTTACGGGGGTTTTTGCTCGAAGGGG |
| | | | | TTATAACATTCAGAGTTTAGCTGTGGGTCATGCGGAAGGTGAGGGT |
| | | | | CTATCTCGTATCACTACTGTTGTACCCGGTACAGATGAATCAATTAG |
| | | | | CAAATTGGTTCAACAAATCTACAAGCTGGTTGATATTCATGAGGTTA |
| | | | | GAGATCTTACCCATTATCCATTTGCTGAGCGAGAGTTGATGTTGATA |
| | | | | AAAGTAGCTGTGAATACTGCTGCACGTCGTGAGGTCCTAGACGTTG |
| | | | | CCAGCATTTTTAGAGCAAAAGCTGTTGATGTATCTGATCACACCATA |
| | | | | ACACTTGAGCTCACTGGAGATTTGAACAAGATGGTTGCTCTACAGA |
| | | | | GATTGCTCGAACCGTATGGAATCT |
| 1697 | Amaranthus | cDNA | 621 | CTGGAAATGACGAGTCGATTGGAAAATTAGTTCAGCAATTTAACAA |
| | lividus | Contig | | GTTAGTAGACCTTCATGAGATTCAAGACCTTACTCACCAGCCATTTC |
| | | | | AGAGCGAGAGCTTATGTTGATCAAAATAGCTGCAAATACTACAGCC |
| | | | | AGGAGAGATGTCCTTGATATTGCTAATATTTTCCGTGCAAAAGCTGT |
| | | | | GGATGTTTCTGATCATACAATAACATTACAACTTGCTGGTGATTTAG |
| | | | | ACAAAATGGTTGCGCTACAGAGATTATTGGAGCCTTACGGCATTTG |
| | | | | TGAGGTGGCACGGACTGGAAGAGTAGCACTAACGAGAGAGTCTAG |
| | | | | GGTAGATTCCAAATATCTACGAGGATACACTCTTCCGTTGTATGAAT |
| | | | | GAAAAACTCCAGCTATGTCTTTCCGACATTACCTTGTCTGATTCCTTC |
| | | | | CGCTCTTCTACACTGCATTGCAAGCAGAACAATTGCCCACAAGTGG |
| | | | | AGTAAATTAAAAGGGGAAACAACAATACCGATCTTTGCTTTGAAGA |
| | | | | TATACTGATTTGTATAACAATAGAGTTTGTATTTGACTAGTATTTATT |
| | | | | TGCTCAACGCTGTAATAACATATCCCCTTGAGGTTTGATATATGGAA |
| | | | | GGAAAAATTACCCAG |
| 1698 | Amaranthus | cDNA | 509 | TTCATTTGTTTCTCATCTCTCTCCAATGGCGGCCATTTCCTTTAACATC |
| | lividus | Contig | | AATGGCGGAAAGATTGGAACTTTATGTCCAAAACCTAAATATGGTT |
| | | | | GTGCGTTTTTGAGAAAATGGGATTTTGGAGCTCATACAACTGTATAT |
| | | | | ACTAAACCCATGTCAAAAATTTCAAGCCTGAAAGCAGTTGAAGTTTC |
| | | | | TACCAATGCTACAGAAAACGCAGTTTCTCTTTCAGCTAACTCTAGGG |
| | | | | TGATGCATCACACAATTTCTGTCTTTGTCGGGGATGAAAGTGGAAT |
| | | | | AATCAATAGGATTGCAGGTGTTATTTCTAGAAGAGGATATAATATC |
| | | | | GAGTCTTTGGCTGTTTGTTTAAACAAGGATAAGGCTCTTTTTACTAT |
| | | | | AGAAGTGTGTGGAACTGACAAGGTGTTGCGCCAAGTCGTGGAACA |
| | | | | GCTTAACAAGCTTGTTAGTGTTTTGAAGGTTGAAGATCTATCGAGA |
| | | | | GAGCCACAAGTGGAACGTGAACTGATGCTTGTAAAGCTTAATT |
| 1699 | Amaranthus | cDNA | 1678 | AAATTTCCATCCATGGAGGCTGTGTCGACTCACCTTTCAACGAGTTT |
| | palmeri | Contig | | TAACTCCATTTCGAAAAGCAATAGATTCAACCGCCAAACTGCAAAAC |
| | | | | GATTAGGGTTCACCTTGAAACCCCATTCTCTGTGTTTTAAGTTTAACT |
| | | | | CCAATGATGACAGGAATTCGGAGTTTGATAAACTGGTTGTATCTGC |
| | | | | AAGCAATGTTGATCAACTGGGAAATCAAAGTAACTTATCCTTTAATC |
| | | | | CCCCTTCTTCCTCTCGATCAAAGGAGAGACGACATACAATATCAGTA |
| | | | | TTTGTGGGGGATGAAAGTGGAATGATTAATCGAATAGCAGGGGTT |
| | | | | TTTGCCAGAAGAGGTTATAATATCGAATCACTCGCTGTTGGATTGAA |
| | | | | CAAGGACAAAGCTCTCTTCACTATTGTAGTTTCCGGAACGGATAATG |
| | | | | TGTTGCAGCAAGTGATGGAACAGCTTCAAAAGCTTGTCAATGTTTT |
| | | | | GAAGGTTGAAGATATATCCAAGGAGCCTCAAGTAGAACGTGAATT |
| | | | | GATGCTTGTAAAAGTTGGAGCTGATCGGAATAACCGTGCTGAGCTG |
| | | | | ATGTGGTTGGTGGACATCTTTCGTGCCAAAATTGTGGACATATCGG |
| | | | | AAGAGTATCTTTCAATAGAGGTCACTGGAGATCCAGGAAAGATGGT |
| | | | | TGCTGTCCTTAGAAACCTAAGCAAGTTTGGCATCAAAGAAATTGCTC |
| | | | | GTACCGGAAAGATTGCTCTAAGAAGGGAAAAATTGGGCGAGTCTG |
| | | | | CTCCTTTCTGGCGTTTTTCTGCTGCTTCTTATCCTGATCTTGAAGAAG |
| | | | | CTATCCCTATGGATGCTCTTTCTGGAGTTTCAAAAGCAGCAACTGCT |
| | | | | GCTGGATCATCGGATTCGTCTGTGGAGGGTGATGTTTATCCTGTGG |
| | | | | AGCCGTTTGATGGTTTCTCCCCTCCAATCTTAGATGCTCATTGGGGT |
| | | | | ATTTTGAATGAAGAAGATACTAGTGGGATGCGGTCACACACTCTAT |
| | | | | CTATTCTTGTCAATGACAAACCCGGGGTCCTTAATGTTGTTACGGGG |
| | | | | GTTTTTGCTCGAAGGGGTTATAACATTCAGAGTTTAGCTGTGGGTC |
| | | | | ATGCGGAAGGTGAGGGTCTATCTCGTATCACTACTGTTGTACCCGG |
| | | | | TACAGATGAATCAATTAGCAAATTGGTTCAACAAATCTACAAGCTG |
| | | | | GTTGATATTCATGAGGTTAGAGATCTTACCCATTATCCATTTGCTGA |
| | | | | GCGAGAGTTGATGTTGATAAAAGTAGCTGTGAATACTGCTGCACGT |
| | | | | CGTGAGGTCCTAGACGTTGCCAGCATTTTTAGAGCAAAAGCTGTTG |
| | | | | ATGTATCTGATCACACCATAACACTTGAGCTCACTGGAGATTTGAAC |
| | | | | AAGATGGTTGCTCTACAGAGATTGCTCGAACCGTATGGAATCTGTG |
| | | | | AGGTTGCACGAACAGGACGTGTGGCCTTGAGTCGAGAATCAGGTG |
| | | | | TAGACTCGAGATACCTTCGTGGATACTCTTTCCCTGTATAAGAGTTC |
| | | | | TGTCAAAACGTATGATGTAAAAAGCCTTTGGGATTTTTTCTTTTCGA |
| | | | | AATTGTCTCCAATTTTTGATCCTTTGAAGTTGTGTTCTTGAAGAATAT |
| | | | | TTGCAAGTTTGTTATGAAACTTTGTTTAAGTGAACAATAATTCTCTCA |
| | | | | TGAGACGGTCTAATGTGTGAGATCTCTTGTTATATTGGGCTTAGTAG |
| | | | | CCC |
| 1700 | Amaranthus | cDNA | 1483 | ACATATGCTAAAAACTTCAAGGTTTAAAGCAATGGAAGTTTCTGCA |
| | palmeri | Contig | | AATGCAACAGTAAATATAGTTCTGTTTCAGCTCATTCTAGGGTGATG |
| | | | | CGCCACACAATTTCAGTCTTTGTTGGGGATGAAAGTGGGATAATCA |
| | | | | ATAGGATTGCAGGTGTTATTTCTAGAAGAGGATACAATATCGAGTC |
| | | | | TTTGGCTGTTTGTTTAAACAAGGATAAGGCTCTTTTTACTATAGAAG |
| | | | | TGTGTGGAACTGACAAGGTGTTGCGCCAAGTCGTGGAACAGCTTAA |
| | | | | CAAGCTTGTTAGTGTTTTGAAGGTTGAAGATCTATCGAGAGAGCCA |
| | | | | CAAGTGGAACGTGAACTGATGCTTGTAAAGCTTAATTCTGATGCAA |
| | | | | ATTCCCACGCAGAGCTAATGTGGCTAGTGGACATCTTCAGGGCAAA |
| | | | | AATTGTGGATATCTCAGAAAGCTTGGTCACTGTTGAGGTGACCGGA |
| | | | | GATCCTGGAAAGTTGGCTGCTGTCCTAAGAAATTTTAGAAAGTTTG |
| | | | | GAATCAAAGAAATTGCAAGGACCGGAAAGATTGCTCTAAGGCGAG |
| | | | | AAAAGATGGGTCAGACGGCTCCTTTTTGGAGATTCTCTGCTGCTTCT |
| | | | | TATCCAGATCTACAAGAAAAGGCTGTTGATGCTCTGGCCAGGCCTA |
| | | | | CGAAACGGAGCATCAATGGTGATTCTGGCTCATCTTCAAGTGGTGA |
| | | | | TGTTTATCCGGTGGAACCTTATGATGGTTCGATGGTTAATCAAGTAC |
| | | | | TTGATGCTCACTGGGGCGTACTTTATGACGGTGATTCAAGTGGTCTC |
| | | | | CGGTCACATACGCTGTCCATGCTGGTAAATAATGTTCCCGGAGTTCT |
| | | | | TAACACTGTTACAGGAGTAATTTCTCGTAGGGGTTATAACATTCAGA |
| | | | | GTCTTGCTGTAGGCCCTGCTGAAAAGGAGGGTCTTTCTCGTATCACA |
| | | | | ACTGTCATTCCTGGAAACGACGAGTCGATTGGAAAATTGGTTCAGC |
| | | | | AATTTAACAAGTTAATAGACCTTCATGAGATTCAGGATCTACTCACC |
| | | | | AGCCATTTTCAGAGCGAGAGCTTATGTTGATCAAAATAGCTGCAAA |
| | | | | TACTACAGCCAGGAGAGATGTCCTTGATATTGCTAATATATTCCGTG |
| | | | | CAAAACCTGTGGATGTTTCTGATCACACAATAACATTACAACTTGCC |
| | | | | GGTGATTTAGACAAAATGGTTGCGCTACAGAGATTATTGGAGCCTT |
| | | | | ACGGCATCTGTGAGGTGGCACGGACTGGAAGAGTAGCACTAGCTC |
| | | | | GAGAGTCTAGGGTAGATTCCAAGTATTTACGAGGATACACTCTTCC |
| | | | | GTTGTATGAATGAAAAACTCCGGCTATGTCTTTCCGACATTACCTTG |
| | | | | TCCGATTCCTTCCGCTCTTCTACACTGCACTACGGGCAGAACAATTG |
| | | | | CCCACGAGTAGAGTAAACTAAAAGGAGAAGCAACAATACCGATCTT |
| | | | | TGCTTTGAAGATTGTATAACAATAGAACTGTCTCTTATACACATCT |
| 1701 | Amaranthus | cDNA | 1480 | ACATATGCTAAAAACTTCAAGGTTTAAAGCAATGGAAGTTTCTGCA |
| | palmeri | Contig | | AATGCAACAGTAAATATAGTTCTGTTTCAGCTCATTCTAGGGTGATG |
| | | | | CGCCACACAATTTCAGTCTTTGTTGGGGATGAAAGTGGTATAATCA |
| | | | | ATAGGATTGCCGGCGTTATTTCTAGGAGAGGATACAACATAGAGTC |
| | | | | TCTGGCTGTTGGTTTAAATAAGGATAAGGCTCTTTTTACTATAGTAG |
| | | | | TGTGTGGGACTGACAAGGTGTTGCGCCAAGTAATGGAGCAGCTCA |
| | | | | GCAAGCTTGTTAATGTCTTAAAGGTTGAAGATCTATCTAGAGAGCCT |
| | | | | CAAGTGGAACGTGAACTTATGCTTTTAAAGCTTCATTCTAATGCAGA |
| | | | | TACCCATGCTGAGATAATGTGGTTAGTGGACATCTTCAGGGCAAAA |
| | | | | ATTGTCGATATGTCGGAAAGCTTCGTTACTGTAGAGGTGACTGGCG |
| | | | | ATCCTGGAAAGATGGCTGCTGTCCTGAGAAATTTTAGCAAGTATGG |
| | | | | AATCAAAGAAGTTGCCAGAACAGGAAAGATTGCTCTAAGACGAGA |
| | | | | AAGGATGGGCGAGACAGCTCCTTTTTGGAGATTCTCTGCTGCATCTT |
| | | | | ATCCAGATCTAGAAGAAAAGGCTGTTGAATCTTTTGTCAGGCCTGC |
| | | | | AAAAGAAGCATCAATGCTGATCCTGGCTCATCGTCTAGTGGTGATG |
| | | | | TTTATCCAGTGGAACCTTATGAAGCCTCCATAAATACAGTACTTGAT |
| | | | | GCTCACTGGGGAGTTCTTTACGAAGATGATTCAAGCGGACTTGTGT |
| | | | | CACATACTCTGTCCATGCTGGTAAATAATGCTCCTGGAGTTCTGAAC |
| | | | | ACCGTTACAGGAGTAATTGCTCGTAGAGGTTATAACATTCAGAGTC |
| | | | | TTGCTGTGGGCCCTGCTGAAAAGGAGGGTCTTTCTCGTATCACAACT |
| | | | | GTTGTTCCTGGAAACGACGAGTCAATTGCAAAATTGGTTCAGCAAT |
| | | | | TAAACAAATTAGTAGACCTTCATGAGATTCAGGACCTTACGCACCA |
| | | | | GCCATTTGCAGAGCGAGAGCTTATGTTAATTAAAGTAGCGGCAAAT |
| | | | | ACTTCGGCCAGGAGAGACGTCCTTGATATTGCTAATATATTCCGTGC |
| | | | | AAAACCTGTGGATGTTTCTGATCACACAATAACATTACAACTTGCCG |
| | | | | GTGATTTAGACAAAATGGTTGCGCTACAGAGATTATTGGAGCCTTA |
| | | | | CGGCATCTGTGAGGTGGCACGGACTGGAAGAGTAGCACTAGCTCG |
| | | | | AGAGTCTAGGGTAGATTCCAAGTATTTACGAGGATACACTCTTCCGT |
| | | | | TGTATGAATGAAAAACTCCGGCTATGTCTTTCCGACATTACCTTGTC |
| | | | | CGATTCCTTCCGCTCTTCTACACTGCACTACGGGCAGAACAATTGCC |
| | | | | CACGAGTAGAGTAAACTAAAAGGAGAAGCAACAATACCGATCTTTG |
| | | | | CTTTGAAGATTGTATAACAATAGAACTGTCTCTTATACACATCT |
| 1702 | Amaranthus | gDNA | 9758 | ATGGTAAATCATCACTATGCGGCCTAATTTGATGTGGCCTAATTTGA |
| | palmeri | Contig | | TAAAAGGATATTTGGTTTTTTTTTTTAATTTTTTTTCTTGTTTTAATTA |
| | | | | TTTTATTAAAATGACTGATGATTTTAAATCACCATTATTGATTAAGAT |
| | | | | TTAATATAAATCACATTGTAAAAGCAACACAAAAAGCACAAATTCAA |
| | | | | TAATATACTCTTTAAGTTTGTTTATCTTCTAATTAGTTCGGTTAAAAC |
| | | | | GGTTCCCCACTTTCTTCTCCGACTCTCACAATTATCTTCCCCTATTCAT |
| | | | | TTTTCTTCCACCCTCTCTAATGGCGGCTGTTTCCTTCAATATCAATGG |
| | | | | TGGAAAGATTGGAACTTTATGTTCAAGACACGAATTCGTTTGTGGG |
| | | | | TTTGTAAGAAAATTTCATTTTAGAACTCATACTTCTATATTTGAAAAA |
| | | | | CATATGCCAAAAACTTCAAGGTTTAAAGCAATGGAAGTTTCTGCAA |
| | | | | ATGCAACAGTAAATATAGTTCCTGTTTCAGCTCATTCTAGGTAATTTT |
| | | | | ATTTCTCGAAAATTTTTGATTTACAATTAAATTAATCTTGTTTTGTAG |
| | | | | GTAATGAATTGCAGATGAAATAGATGGATTCTTATTTGTTTATTGGT |
| | | | | ATTTGTTTATAAATTTTTGTTTATATTAGTTTCTGAATTGTGATTATTC |
| | | | | TGATTGTATGTCAAGGTTTAGGTTGTTACTAAATGTAAATTGGATTG |
| | | | | ATTGAAGTTGCAATAAGGTGATGGCGTGATGCTGATTGTTGTAAAT |
| | | | | TTTTGTTTATATTAGTATAGTACTACTTATTGACCTAAGTTCTTTTACA |
| | | | | TAGTAGGAGATATTATAACTTTTGCTTGTGGACTCAGGGCCGGCCCT |
| | | | | AAGGGTGGGCAAGAGGGGCCGTCTCCCAATGCCCATGTCAAAAAA |
| | | | | GCAAAATTAATGGTTATATAAGGTTTATATAGGTTATAAATTGTAAA |
| | | | | GGAAAAGGACGTCAATGTGTCATTTCTCCCAGGGCCCCAAAATATC |
| | | | | TAGGACCGGTCCTGAAAGAAACTACTCAAAATTTGTAGGATTTTCTA |
| | | | | TTGAGACATTTTTTTTTTTGTGGATTAATGATTGAACTAAGATCAAAT |
| | | | | AGATACTATTTCTGTTTGATTGAAACTTTTGGGTAGCCGGATGTGTA |
| | | | | CCGGTGTGTGACTTCTTTTTGAGTTGGTTAGTTCAATTGTATTGTTA |
| | | | | GAAATGATCTTTTCTAGGGTCTTTGGAGACATTGGTTCTTTACTTTTA |
| | | | | GTCTATGAATTATGATAGTGTTGGTTTAAACACCATTTTGTTACCCTA |
| | | | | TTGTGATTAAGTGACTCCCAGCTCGATTAAATTTAGGAGTTATATTA |
| | | | | ATGTTGTCTTTGTTAGTTATATTGATGGTCGGTAGTTCGGTTAAGTT |
| | | | | TGTCTATGAATACATTGATTTTATCCTTATTTGGCCAACAAATGTATG |
| | | | | TAATTTAGGAAAGTTATATGATTTACCACTTTGTATTTGTATCTCTGT |
| | | | | TATTTTCTTTCTTCTTTTCTTGATGTGTTGGTTGGATAAAAGGAATTT |
| | | | | GGAGGGAAAGAAAGGAAAGAGAAATAGAGGGATGAGACTTTGTC |
| | | | | ATATGTATATCAAATAGAGATGGGAAATGGAGGGGAGGGAATAAT |
| | | | | AACAATGAATTCCTTCTATTTTTTTTGAAACCAATCCCTCCATTATTA |
| | | | | GAAAGTTTTATATTAAAAACTCACCGCTTTCCCTCCCCTACTCCTTCC |
| | | | | TTTCTAGTCTCTCCCCCCTCCCACCCTTCAATAGCTTATCCTTTCATGC |
| | | | | CGTCCAACAAAATTTGAACTCATATCCTTGTGTATGATCGGAGAAAG |
| | | | | TAATGACTGAATCATTCATGAAGCTCATCCTTGGTGAATTTATCTCTT |
| | | | | TTTATCCAGTCTTTGAGTCTCGTGGTTCAGGAACGCTGCCAAATCTC |
| | | | | TTGAATAAAAGTCATTTTAAATTATCATATGTATCACATTCTATGCTG |
| | | | | TTTTTTTTTCTTGTATTTTGCTATCATTAGAATGGTAATAAAATGTATT |
| | | | | TTCATTCTTTTCCAGGGTGATGCGCCACACAATTTCAGTCTTTGTTGG |
| | | | | GGATGAAAGTGGTATAATCAATAGGATTGCCGGCGTTATTTCTAGG |
| | | | | AGAGGATACAACATAGAGTCTCTGGCTGTTGGTTTAAATAAGGATA |
| | | | | AGGCTCTTTTTACTATAGTAGTGTGTGGGACTGACAAGGTGTTGCG |
| | | | | CCAAGTAATGGAACAGCTCAGCAAGCTTGTTAATGTCATAAAGGTA |
| | | | | GTCATCTCCTTTTTTCTTACTTTAAGGTAACTAGTGATACTTTCATTTA |
| | | | | GTAGTGGCGGTCAATGGTGATTCTAACCATGCATGTTCATATTGTTT |
| | | | | GTGCAATATTGCTCATTTTGAGTCTTTGACTTTATCATTGTTGTTAAA |
| | | | | CTTTGAGAGAATATAATCTCGAGAGCATCTATCCTCATTTTAAGATA |
| | | | | GATAGAGCAGGAAAACACTCATGATTCTTTAATAAACTTTCAAAATA |
| | | | | TTAAAATTCCCTTGCCCTAATGCAATTTTATAGCTCCCAGCTAATCCG |
| | | | | AGTTCAAGGGGTTCGAGTGTATGCAACCATACTCATATAACAACAA |
| | | | | AATGGTTGATTCAGATTGACCCTTAAAATCAAATACCATCTTGCAAA |
| | | | | TTCACTTAAACACATACTTTAACGACCCGTTTTATAGTAGTCCATTAA |
| | | | | AATTCGAAAGCAAAGAATTATAAAATCTTTTATTCCATCGAGAATAG |
| | | | | ACACAATAATCTTCAAAGCAATGTCTATAAAAAGTTTGTCGTGTCAC |
| | | | | CGTATCGTAACTTAATTGTAAGGGCCTTCAATTTTACTGCCATCAAA |
| | | | | ATATAGGTTGAGACCCACAAAACCATTTACATAGACAAGAGCCATT |
| | | | | TCACTACCATTATCATAACCATGATTGAGACCGCATTTGTGCACAAT |
| | | | | GGTCAAGTGACATTCTTCAGCAATACTTAGAGCTTGAATTGGAGGA |
| | | | | ATTTGTATAATGATCTACTTATGTAACAAATTCTTGATAATGTTGTCA |
| | | | | CATATAGTGGGGAGAAATTTGAAGGTCACAAAGCTACCACATGTAA |
| | | | | CTGAATGCATCTATTGCAGTCAAACCTGATGGCAGACAACTGTCAA |
| | | | | GGCAGTCTTTTGTAAGGAACCTTTAGAAGGTATCTTTTAAAGAAAA |
| | | | | AAAATTTGTCGTTAGTTTTTAAAAAAAGTTAAAAATTATTTTCTTGAA |
| | | | | AATTTTCTTTTTAAGTAAAATAAGTGTGGTAAAATGGACATTATGTT |
| | | | | GGAACTTAGAATTTTTAGTAATAGCTTGTTAATTAGCATGGGAAGT |
| | | | | GATTAATGAAGTTTTATGTCCATTAGGTAATAATGTGTGAAGTATTC |
| | | | | TTATATGTATTATTGCTGCACTTTCCATTTGATGGTGCGCATCAGGG |
| | | | | CATGCAATAGTACTTTTTTTGATCTAACATATATGTCCTTACTTATGC |
| | | | | TATATGCTCGCAGCTAAGTATTCCTTACTAAAGGTGTTTTACGGGGC |
| | | | | GATTCGACTAACGGGTTAAGGGTCGGGTCACATTTTAACGGGTCAT |
| | | | | CAACGGATTAGGTTAATAAAGGGTCGGGCCATTAACGGGCCTTGGT |
| | | | | GTAAAGGGTTGGGCAGAGCCGGGTCAAATAATTATAGGAATTGGT |
| | | | | TGCAACATTTTTTTTTTCCACTTTTTGTTTTTATATTTTAGATATTATAT |
| | | | | ACAAAGTTAGGTTGACCCAATGGGCCATAAAGTTGAATAAAAAAAA |
| | | | | CTATTACATGAACCTTTAAAAACGGGTCAAAGTGGGCCTGGTTTAA |
| | | | | ACGAGCTTTGACCCGTCCTGCCCCGTTGAAATTTGACATGACCCTCC |
| | | | | CCGCCTCGCCCTATTTAAATTTAGCTCCATCCCGGCCCATTGAACAC |
| | | | | ATCTATTCCTAAAATAACTAACATTATGATGGCTCATCCTATTCGCTA |
| | | | | CCATGCATGTAAATGTACACAGTGTCTATCCGTTTATCCTTTTTTATA |
| | | | | TCCCTGTATACCATTTGTGACTAACGGTATTAATTTTTTATCTTCCTT |
| | | | | GTAGGTTGAAGATCTATCTAGAGAGCCTCAAGTGGAACGTGAACTT |
| | | | | ATGCTATTAAAGCTTCATTCTAATGCGGATACCCATGCTGAGGTAGT |
| | | | | TCCACAAGTTCAAATAATTATATCCTGAATGCTATATAATTCATGAAT |
| | | | | CTTTTGTTTTCCTCTTAGAATCATCAGCTACAAGAAGGTAGATAAAG |
| | | | | ATAAGCAAATATTCAAAAATATGCTATAACATCATGTGCTTTGTAAG |
| | | | | CTTTAAACTTAGAGATAACAAAAATACTTAAGAATACATCATGGGTA |
| | | | | TGTAGCTGAAGATCAAATGGGAAGTTACATTGCTTCTTTGTGTGTAT |
| | | | | TGTAAACAATCTGGTATCGTATAAGTCCAAATTCCATTTTTTGATTTT |
| | | | | CAGATAATGTGGTTAGTGGACATCTTCAGGGCAAAAATTGTCGATA |
| | | | | TGTCGGAAAGCTTCGTTACTGTAGAGGTTAGTATGTTTGTGGTTGA |
| | | | | CATCTTGTGTACCTATCTTCCGTTCAATGTAGATTCTTTTTCTTAGTG |
| | | | | CTATTTTATTTTCTGTCGTGCAGGTGACTGGCGATCCTGGAAAGATG |
| | | | | GCTGCTGTCCTGAGAAATTTTAGCAAGTATGGAATCAAAGAAGTTG |
| | | | | CCAGAACAGGAAAGGTCAGTCTTTTAGACAATTGCAGTAAATTCAC |
| | | | | CGGAATACTATGAATGATGCAAAGATTACGTGCGGTAAATCGTAAA |
| | | | | CAGGCTGTTGAATCTCTTCAACTAAATTATATCTGATGCGAAGTGCG |
| | | | | TTTATTCAACTACCTTTTTTGTGTGAAATGATAGATTGCTCTAAGACG |
| | | | | AGAAAGGATGGGCGAGACAGCTCCTTTTTGGAGATTCTCTGCTGCA |
| | | | | TCTTATCCAGATCTAGAAGAAAAGGCTGTTGAATCTTTTGTCAGGCC |
| | | | | TGCAAAAAGAAGCATCAATGCTGATCCTGGCTCATCGTCTAGTGTA |
| | | | | AGTGAAGTTTTATTTGATCAACATTTATCTTATCCTTCTCTTACTTTGT |
| | | | | CTTGCATTAGCGTATATTCTTTTTGGTAATTACAAATTTAGTTTTTTTT |
| | | | | AAATGTTCCTAGGGTGATGTTATTATTGACATTGATAAATATTCTTAT |
| | | | | TGGTAGTATATAGATATATTATATTTCCCATAGATTGCTCTAAGACA |
| | | | | GGTGGCGTATATCCGCCCGTCCGAAACCCCGCCAAGTCTCATACGG |
| | | | | GCATACGGCCCGTTTGGTAACTGGCAATGATAATGAATGTTAGTAT |
| | | | | AATTTTGGTAAGAATATCTTCTCATAAACTTAATGACTTTACTTATTC |
| | | | | TCCTTCAACAAGCTCATTTTCCTTACAAAATTCTTTATAATGCATCAC |
| | | | | CACTTAAACCTGTGGTATAAGGTGGTACTGAAATATTGTGAACAAA |
| | | | | AACACTTTTTTATTATTAAAATTTCATTACCATAGTGATGACATGATA |
| | | | | CATATTATGAAGATTTACACTACAAATCATTCCCATTACCACCATTTA |
| | | | | GAACCATTAGCCTAACGGGCAGTTAATGCATTGGGATAATGGAGTG |
| | | | | GAAAAAACGTTAATTGTCATTTATGAACTCAATTTTTTGTTTTGGGTT |
| | | | | TGGCACTTTTGCATTTGGAATTTAAAATGCGTTTATTCAATGAAGGG |
| | | | | TGATGTTTATCCAGTGGAGCCTTATGATGCCTCCATAAATACAGTAC |
| | | | | TTGATGCTCACTGGGGAGTTCTTTACGAAGATGATGTAAGTTCTCTT |
| | | | | TGTCACTACCTGAATTTTGTTCATCTTGTAGCATACTTTCATATGATG |
| | | | | TGATCTTCAGATCTTTTACTTAATGTTACCTTAATTTACTAAATGGCT |
| | | | | TCATATTTTTCCCAGAATGGCCTAAAATTCGTTAGTTTGGCTCATAAT |
| | | | | TATTTAAGACATGTCAAACTTTCCTTAAGACCGGCTCTATCAAATCTT |
| | | | | TAGCCTTATTTGGGAGGTTCTGGTTAATGTCTTTCAATGTTTGGCTT |
| | | | | ACTTGTTCATCCTCAGAACTTTCATATTTGTTTGATTTTAAGCAACGT |
| | | | | TATTAGAATTGAGATTCTACAACACTACGATTCTACCTACGATCTAG |
| | | | | ATTGCTCGCTTGTTTCGGATCGTATTATAGTAGAATTGTAGATCAGA |
| | | | | ATCATGATTTTAATAACTATGGTTTTAAGAATGGAGTAGTTTAATAA |
| | | | | ATCTGTTCTGTTAGTATTCTGATGTACTTTCAACATGCCAGTCAAGC |
| | | | | GGACTTGTGTCACATACTCTGTCCATGCTGGTAAATAATGCTCCTGG |
| | | | | AGTTCTGAACACCGTTACAGGAGTAATTGCTCGTAGAGGTTATAAC |
| | | | | ATTCAGGTCAGTACGGACTCTGACTGCACCATGAAAGTATATCTCGT |
| | | | | CTTTTGCATTATGTTAAGTTGATTGTCCCTTTTCCTTCTTCCCAGAGTC |
| | | | | TTGCTGTGGGCCCTGCTGAAAAGGAGGGTCTTTCTCGTATCACAACT |
| | | | | GTTGTTCCTGGAAACGACGAGTCAATTGCAAAATTGGTTCAGCAAT |
| | | | | TAAACAAATTAGTAGATCTTCATGAGGTGAGCATCTATTTGCATTCA |
| | | | | GCGTAGACATAATCGTCCAAATTAGTTAGTGTCATGTTTACTTATGT |
| | | | | CGTTGTTGTCGCAGATTCAAGACCTTACTCACCAGCCATTTGCAGAG |
| | | | | CGAGAGCTTATGTTAATTAAAGTAGCGGCAAATACTTCGGCCAGGA |
| | | | | GAGACGTCCTTGATATTGCTAATATATTCCGTGCAAAACCTGTGGAT |
| | | | | GTTTCTGATCACACAATAACATTACAAGTAAGCATAAATGAATTTGG |
| | | | | TAGTTTATTTAGTCTTCTCTTGTTACTCTCAACAATGTCTATTCACAAA |
| | | | | TTCTTGTGTGAGACGGTCTCACCGTGATACGTTCCCCATACATGGAT |
| | | | | TGAATAGCCCAACTAATACAATTATCAGCATATGAGCTTCAATTAGT |
| | | | | CTCTTACAAGAGTAAATCATGTCTATATCCTTATTTCGATGGTCCATT |
| | | | | TCGAATTGAAACGAATATAAATAAAAAGCTAATGGAATGCGAGTAT |
| | | | | TTCACTAATAACGAAAACCGTAGGGAGCTAAGACAGTTTACGGTAT |
| | | | | TGAGGATCTCTGTAATTTGTCTTTGTTTTTTTCAGCTTGCCGGTGATT |
| | | | | TAGACAAAATGGTTGCGCTACAGAGATTATTGGAGCCTTACGGCAT |
| | | | | CTGTGAGGTATGTTTATATGCATATTTATTTCTCCCGAAACCGATTA |
| | | | | GAATCATTTCATGTGTTCGGGTCAAATAGGAAATATATGGCCATTTG |
| | | | | TAGCTTTTCAATAGACTCCGAGAAGGCGAGAACCCTTATCTCCTTAA |
| | | | | CTACTAAAACATTTACAGCTCGTTGATTGTCGGTAATAAAAGGTGAT |
| | | | | ATTGAGAATAATTTGTAGTGTAAATTTTTCATGATTGTATTATATCAT |
| | | | | TCCCTGGGTAATGAATAGTTAATCATAAAAAAACTTTTTTTTTCGCA |
| | | | | ATTTTTCATTACCATTTGTGTCACCTCTACGAATGGTAATGCATATGA |
| | | | | TTGATTGAATGAGCTTTATGAAGGAAATAAGATGATTGAAGTAAAT |
| | | | | CAATCAAGATCGTTAAACTTGTAAAGAGATTTTCTCACCAAACTTAC |
| | | | | TCTAAATTTCATTTCCATTTCCACTATTCAATACCGATAACTAAACGG |
| | | | | GCATCAGCACCATTTAGTCGAGTACTTGATTGCAATTCAATTTAATT |
| | | | | CAGTTCAGTTTAGTTGTAAGTAGTTCTAGAGATAGCGAACTTCAATG |
| | | | | ATCATGGACTGACTATAACATTTTATATCTGTCTTCAAGGTGGCACG |
| | | | | GACTGGAAGAGTAGCACTAGCTCGAGAGTCTAGGGTAGATTCCAA |
| | | | | GTATTTACGAGGATACACTCTTCCGTTGTATGAATGAAAAACTCCGG |
| | | | | CTATGTCTTTCCGACATTACCTTGTCCGATTCCTTCCGCTCTTCTACAC |
| | | | | TGCACTACGGGCAGAACAATTGCCCACGAGTAGAGTAAACTAAAAG |
| | | | | GAGAAGCAACAATACCGATCTTTGCTTTGAAGATTGTATAACAATA |
| | | | | GAGTTTGTATTTGACTAGTATTTACATTCTTTTTATTAAATTGTATGA |
| | | | | TTTGCTCAACGTTGTAATTACATATCACCTTGAGGTTTTTGATTTAGC |
| | | | | ATTGTACCCTGGCTAAGATAACATAGTCATTTCAGGACATACGAGT |
| | | | | GTTCCCAGAACACAAGGAAAAAAAAAAGAACACAAGAATATTGAA |
| | | | | AATTTGAAACAAATAACTAATTTAAAAAAAAAAAAGCTTCTGGTAA |
| | | | | ACTTAATTTCAAAATAAAGAATTTCCATGTCCAAGCCTAAGGTCATG |
| | | | | TATGTTCAAATTCAACTTTCAAGTAAGACCTTATCAAAAATTATCAAT |
| | | | | ACAAGTTTATCAATATTTTATATTATTAGTGTTATTAGGTCAATTGGC |
| | | | | TCCATTTTTACGGGCTTGGTTAAAGGACTCAATAGTTCAGTCAACAC |
| | | | | CTTAGGAAAGCCCACCTTAGGGCTGAAATTACAAAAATGCCTTTTG |
| | | | | AATAGTCATACAGGTCATTAATTGCTTTATAAGTACCCCCATTAATT |
| | | | | GTCGTTTATGGTATGCTTTCTCTCTCTATATTACTCACTTGCATTCAAT |
| | | | | TCCTATTTCATTGTAACGATCACTGACTTGAGCGTCGGAGGGGCTTT |
| | | | | CGGAGAGACCACCCCCGGACAAGTAACTCTGTTCGTTTTGCTGGTC |
| | | | | ATCAGTCGAACTCGATTTTAGTATTCGGACCCTCCAACAGCAGGATC |
| | | | | CACATTCACAAACAACCCCTTCCAATGAGGAATAATTTGACTCGATT |
| | | | | TCTACGCAAAAACAATTAGCATGGAAAATATTTATATATACTAAAAT |
| | | | | ATTATACATTGTAAAATAAATCATTTAAATTATACAACAATGTGGGT |
| | | | | ACAAATTAAAATGTAATTTCATTTCAAGCAATTGGTAGGTTGAATGA |
| | | | | AGCCTAAAACATTCCCATGAGCATTTTGACAATATGATTGAGCTTTT |
| | | | | CCATCAATGTATTTGAGATCAATATTTTGGAGTTGAATTCCTTTGCAT |
| | | | | GGATTTGTGGAACTACAATTAAATGTCATTGCTACCTCGCTTTGTGA |
| | | | | ACTTCCTCTTATATTTTGGTACTTCACATCCTCGATTTCTATACCCGAT |
| | | | | TCCTAATAAACAAAATTAATTATATCATTTATATCTCTGATTGTGCAT |
| | | | | AATTAAAAATTACAAAAAAATTAATATTAGGGATCTTTGCATTGAAA |
| | | | | CGAATCAAACAAGCTAAGATCCCACTTGATTACATATTGTCAAGGA |
| | | | | ACCAACTCAACCAAAAGCTTAAGCTGATTGTTGAGGCCTTAGGATA |
| | | | | TAGTATATACTCTAACACGCCCCCTCACACGAGAGCCCTTTGGGCTT |
| | | | | GAAGTGTGGACGCGACATAGAACCTCCTAATTCCTGGCGTTGAATA |
| | | | | TTCCACTTTAAATGAGGGGTGATTGAGATTCGAACCTGTGACATCTT |
| | | | | GTTTCACTGGCTTTGATACCATGTCAAGAGACCAACTCAACTAAAAG |
| | | | | CTTAAGCTGATGGTTGAGGCCTCAGGATATGTTATATACTCTAACAC |
| | | | | ATATTGTTTATAGATTAAGAATAGTGTTTGGCAAATTAGCTTATTGA |
| | | | | GCCATTTTAGCTTATTTTGATTCAAATAGAGGGTTGAGTGGCAAACC |
| | | | | AGCTAATGCTAGTGTTTGGTGAATTAGCTTGTTGAGTCAGCTTATTG |
| | | | | ATATGAATAAGCTGTTTTTGAACAATCTGCTCATAGCAACGGGTTCA |
| | | | | AAAACAGCTGGTCAAACCAGTTAATATAATCAGTTAGTTAAATCATC |
| | | | | CACTATAATCAACTATTAGTTATCAGTCGTTTGCCAAACATTCTCAAA |
| | | | | ATATAAATTACGAGTAATCGATAACAGTGCCGTTTCTGGCAATGTAC |
| | | | | GGGCC |
| 1703 | Amaranthus | gDNA | 7941 | CAAACAAAAGGTATAAATTTAATTAATATACTTAATTCAAAAAAAAA |
| | palmeri | Contig | | AAATTAATTAATATACTAGTAAGTGTGTTTCGCATTTCAATATTTGAA |
| | | | | TAATATTATCTTTTTGGAATGATAATATTTAAAAGCAACAAACAAAA |
| | | | | GTTATAAATTTAATTAAAAATTACAACTAAGTGTGTTTTGCATTTCAA |
| | | | | TATTTGAATAAAAAATTATAAGTGAGTTGTCTATTTATAATAAAATA |
| | | | | AATAATGCACTACTCATATAATCATATTCATCCTCACTACTCATATTC |
| | | | | TTCTTCAAAAAAAATCCTCACTACCATCTCCATTCTCCCCATTTCATTT |
| | | | | CTTTCTCATATCTCTCTAATGGCGGCCATTTCCTTTAACATCAATGGC |
| | | | | GGAAAGATCGGAACTTTATGTCCAAATCCTAAATATGGTTGTGGGT |
| | | | | TTTTGAGAAAATGGGATTTTGGAGCTCATACAACTGTATCTACTAAA |
| | | | | CCCATGTCAAGAATTTTAAGCTTGAAAGCAGTTGAAGTTTCTGTTGA |
| | | | | TGCTACAGTAAATGCAGTTTCTGTTTCAGCTAATTCTAGGTAATGTA |
| | | | | CTTAATTAATATTACCATTTTTTCATTGAATCTAAACTTTTTTTCTTCA |
| | | | | TGTGGAATTGTGGATATAGGAGTATTTATGGAAAGAAATATAAGG |
| | | | | GTTTTTGCTTCTTTATTGGTTTTTGTTAAAAAAATTGTATGGTTGCAT |
| | | | | ACTTTTGTGATCATTCATGTTCAACACGTTCGATTGTACAAACTCTAA |
| | | | | AAAATTGAATGCAAAAGATACAAAATTGTTCGAAAATATCATAATTT |
| | | | | TTGAAATTTCACAGGGTCTTTTAAAGAATTTTTCAAATTTTGCTCCGG |
| | | | | TCCTGATTCTCCTAAGCTCACCCTATAAGGACTTAAGGAGTCACCAA |
| | | | | AAAGTAAAGTTGAGTATACTAGTCATGTGACTCTAATTTTAGCCTAG |
| | | | | GTGGAAGAAATAGGGTCAAGGTCAATGGAATGTTGTTTGTTTGTTT |
| | | | | GTTCTGGTATCATTACAATTTACAGATATGAAGTTGCAATAAGGTTT |
| | | | | TGGATTATATTGTACCATATTAAATTGGCTTATTAGACTATGTGTACT |
| | | | | TTTATTTATATGAAATTGAGATGATGTTTGCTGCCAAACGTCAATCG |
| | | | | AAAACAACTATATATTATCATTAACAAGGGTAAATGTGAGGTATTG |
| | | | | ATCCCCAAACCCCCACAAATGGAAGTTATTTGATGGCATTGAGGTG |
| | | | | ATATAACATTGTATGAAGTTGCAAATTATGAAGCTAAATCCTGTATT |
| | | | | AAGTGGGAGATAGAGCATCTTTTGGTTGTAATGTTATAACTTTAGTT |
| | | | | GGATTTTGTAAGTTTTGTTGCAAGTTATTCATGAATTAAGGAGATGT |
| | | | | GTCTTTCTATGTGAATCACATATGTAAGAAGTAGTTTATATGTTTGTT |
| | | | | GATCTTTATACTGTATGATGGCCGATTCAAATGTGGAAGTTGATATG |
| | | | | ATCCTTTTAAGGTCTACTGAGAAGTTGTTCTTCAATTCATTATATTAT |
| | | | | CCTTGGTTTTCGACCATAGGAGGTCACATGTTCGAATCTAGCCTCAT |
| | | | | ATATAACATATCTTGAGGCTTCAACCATCAACTTAAACTTTGATTGA |
| | | | | GTTGCTTCCCTGTGACTTTCTCGCCTTCGCTTCACCTTTATGCTTGGT |
| | | | | TTCAGCCTTGCTAAGTTGCTAGTCGTGGAGAGGGTTACTTCAAGAA |
| | | | | GGGTGTCAGCATATATCACTGCAGATTTTTTTGAATACAAAATCGTT |
| | | | | TTTAAAGAAATCATACATGGTTATCTTACTGCTCCTTGATTCGATGG |
| | | | | AGCAAAGTTTTGTTGTTATTTGATTTCCGATTATAATGGATCATTGTA |
| | | | | AAACGACTCTTTAAATTCTGCGCACTTCTTATTTATGTAAAGTTGCAA |
| | | | | ATGATGTTTGCTATATATGTGGTTATCTTATTGTATCTTGTTATTTATT |
| | | | | CTCAGGTAATGAAACAGAATTCAAACTCTAATGACATTTCATATATT |
| | | | | TCATTTTGTGTATACAGGGTGATGCGTCACACAATTTCTGTCTTTGTC |
| | | | | GGGGATGAAAGTGGGATAATCAATAGGATTGCAGGTGTTATTTCTA |
| | | | | GAAGAGGATACAATATCGAGTCTTTGGCTGTTTGTTTAAACAAGGA |
| | | | | TAAGGCTCTTTTTACTATAGAAGTGTGTGGAACTGACAAGGTGTTG |
| | | | | CGCCAAGTCGTGGAACAGCTTAACAAGCTTGTTAGTGTTTTGAAGG |
| | | | | TAGTTAATTTCCTTTGTTCTTCCTTTTATTGGTAAATGGTGATAGTGA |
| | | | | TACCCTTGTAACATAAATCTTCGAATAATGAGACTATGACATAGTGC |
| | | | | TTGGTTCACCACTTTACGGATTGCGTTCGATAAAATTACTTTACGAG |
| | | | | GTCTTATAATTTATAAATCTGTTTTCCAAAATAGCTTATACAAACTAA |
| | | | | ACATATCCTGAATTTGTTTTTTACTAAAATAAAAAAAAATTCTTTTAA |
| | | | | TATGGAGCGTTACGTATCAATCAATATAATGGATCATCTTATATGCA |
| | | | | TATGTTTGTACAATGTACATTTTTTGTTAGATTGTCTATTTGTCCTGA |
| | | | | TAACAACCTTGGATGATTCTTGTATTTCTTGTAGGTTGAAGATCTATC |
| | | | | GAGAGAGCCACAAGTGGAACGTGAACTGATGCTTGTAAAGCTTAAT |
| | | | | TCTGATGCAAATTCCCACGCAGAGGTAGTTCCAAAAATTCAATGATA |
| | | | | ATTTATGAATGGTATATTTTCCACTTTTTAAGTTCTAATTTCCTCGGC |
| | | | | TGTTGTCAGTTAGAGTCTAGCAAGGAAAAAGATAGAGATGTTTTGC |
| | | | | TTTAGATTTTATCGATGATCGAGAAAGATGCTATACTTCATATAAGG |
| | | | | CCATGACTGTTACAACAACAACGCCAGAGCTTTAGTCCCAAAAGTTC |
| | | | | ATGGCTGTTAGATAGTTTAAATTTAACTAGAAGTACATCGTGTTGTG |
| | | | | TGAAGCTCGTATAAGAAATTGCATTAGTGTCTTTGTGAGAAATCTAA |
| | | | | TACCGATTAACGTAAATTTTTAATTTTTGATCTTCAGCTAATGTGGCT |
| | | | | AGTGGACATCTTCAGGGCAAAAATTGTGGATATCTCAGAAAGCTTG |
| | | | | GTCACTGTTGAGGTTAGTGGTATATTTGTTTGACTTCTCGCGTATCT |
| | | | | CTTCTATGTTTGCTGAATTAAGTCCGATTTTTTTGGATTTGCTTCCAT |
| | | | | GATAAATGCAAGAAATTTACCTACAAGAAGTTGACCATTTTCCTCCG |
| | | | | GTCGATGTAAAATCTTTTTCCTTATTGGCATTTTCTTTGGTGCTGTGC |
| | | | | AGGTGACCGGAGATCCTGGAAAGTTGGCTGCTGTCCTAAGAAATTT |
| | | | | TAGAAAGTTTGGAATCAAAGAAATTGCAAGGACCGGAAAGGTTAG |
| | | | | TCTTTTAGACATTTGCAGTAAATTCAGCATAGAATTCGGAAAGCCGC |
| | | | | AAAGAGCACATGTCAACTATTGTGGCTAGCCAGCCAAGTGCCAACT |
| | | | | ATTGTGCATTTCTGGTGTGATCAATGTGAAACAAGTTTAGCTAACTA |
| | | | | CTTGTTTTGTTTTATACTTAATATGATAGATTGCTCTAAGGCGAGAA |
| | | | | AAGATGGGTCAGACGGCTCCTTTTTGGAGATTCTCTGCTGCTTCTTA |
| | | | | TCCAGATCTACAAGAAAAGGCTGTTGATGCTCTGGCCAAGCCTACG |
| | | | | AAACGGAGTATCAATGGTGATTCTGGCTCATCTTCAAGTGTAAGTG |
| | | | | ATATTTTATCTTCTCGACAATTATCTTTTTCCTTTTCTTACCTTGCATT |
| | | | | GCCTATGTATACTTCGTTCACCTTGTATTGCCTATAGACTTAAACATG |
| | | | | CTTTTATTTTTGAAGGGTGATGTTTATCCGGTGGAACCTTATGATGG |
| | | | | TTCGATGGTTAATCAAGTGCTTGATGCTCACTGGGGCGTACTTTATG |
| | | | | ACGGTGATGTAAGTGCTCTATCACTACCTGAATTTTTTGTCACTAGG |
| | | | | TTGTCCAACGGTCCATGTGATGTCATGTTCAAATCGCTTAGCCTAGT |
| | | | | GTTTTCTAATATAGCTCCAAATTAATTGTCTGGATTCACGATTCACCC |
| | | | | AAAATGGCCTAAATTTTTTCGTTTTAATTTACAATTGTCCAAGTCATG |
| | | | | TCAAACATGTATTAAGGTCTACACTCTGCTCTATGTTACTTGGACTC |
| | | | | GGGTACTGAGTCGGCAACGTGTCCAAGTGTCGTACGCGTCTAAATA |
| | | | | TTCAATTTTACGCTTAAAATGAAGTGTCTAAATGTCATACCAATGTC |
| | | | | CGGGCATCAAGGATCGGACATAGGTACGTGAAGCAAAATGAAGAG |
| | | | | TCTGAGTAATAGCGTTTCAGCCTCATTTGAACTTTGGAGGGTTAAAG |
| | | | | TTTATGTTTTTGGGTTTTCAGATGTTCATCTTTCTGTTATTCATGTTTA |
| | | | | ATTTTAAGAATGAAAGGTAGTTCGACTTTTCAGTTTTTTGAGCTGCA |
| | | | | CAGTACTATAAATTGGTTTTAGTTTGCTCTGCTAGTATCATGAATTGC |
| | | | | TTCGTTCTTCATGCCAGTCAAGTGGTCTCCGGTCACATACGCTGTCC |
| | | | | ATGCTGGTAAATAATGTTCCCGGAGTTCTTAACACTGTTACAGGAGT |
| | | | | AATTTCTCGTAGGGGTTATAACATTCAGGTCAGTGTGGACTCTGACT |
| | | | | ACAGCAAGAAAGTATATAAAGCCGTTTGTGTTATGTAATGACAATC |
| | | | | GTTCCCTTTTCATCCTCTTCAGAGTCTTGCTGTAGGCCCTGCTGAAAA |
| | | | | GGAGGGTCTTTCTCGTATCACAACTGTCATTCCTGGAAACGACGAG |
| | | | | TCGATTGGAAAATTGGTTCAGCAATTTAACAAGTTAATAGACCTTCA |
| | | | | TGAGGTGAGCAACTATTTATGTACAAAACCGAATAGTTGTAATAAG |
| | | | | TGGTATAGACTACATAGTAATAACTTTATGGTTGTAAGATGCAAAGT |
| | | | | ACCCTTATCAGTTATCACTATAATATGTTCTAAGAAGCTCAAAACTG |
| | | | | AAGTGGAAGAGAAAATTGTGACATTGGTTAGCTCCGCGTTTATGAC |
| | | | | AAACTTCTTGATTGATTCTTGTTTTTTTGAATGCTCAGTTCAATCTCCT |
| | | | | TTGTAATATGTTGATGCTCGTTAAGTTACCTATTTTCTTTGTAATACG |
| | | | | TAAACCGTGAAGTTGTGTTATCTTAGTCCAACGTCACATCGTGCTGC |
| | | | | TCGAGTCATTTGATTTAAAACGCTATTTATATTGAATAGTGTAACAT |
| | | | | ATAACACAGAAAAATAGTAGTCGGGTTGGTTCAACACACACAATAA |
| | | | | TTTCCCACATTCTCCCTTGAATGAAAGATACGAGAATCTAACATCAG |
| | | | | AATGGTTGCTGCTGCAGATTCAGGACCTTACTCACCAGCCATTTTCA |
| | | | | GAGCGAGAGCTTATGTTGATCAAAATAGCTGCAAATACTACAGCCA |
| | | | | GGAGAGATGTCCTTGATATTGCTAATATTTTCCGTGCAAAAGCTGTG |
| | | | | GATGTTTCGGATCACACGATAACATTACAGGTACTAAGCTGTAGGC |
| | | | | ACACAGTTTTTGCCATGTTCCTTGTTTTTTCCTAATATTTCTGACTTGG |
| | | | | TCTTTTCCAGCTCGCCAATATGTTGGGATTCAGGCTTTGGCATTATTT |
| | | | | ATTATTTTATTTTTTTTGCATTTTTTCCAACTTCCTTATATTGGGATTA |
| | | | | AGGCGTTGGCGTTGTTGCATTGTTGACTGTTGTGTCTTTTCCAGCTT |
| | | | | ACGGGTGATTTACACAAAATGGTTGCGCTACAGAGACTATTGGAGC |
| | | | | CTTATGGCATTTGTGAGGTATGCGCCTATGTATTATTGATTTTTCTAT |
| | | | | ATAATCAGATTTTATTTATTTATTTTTGGTTCGAAATATGCTGATTGT |
| | | | | TAGTTATTTTGCTTTTGAATGTGAAAGGATTCTCTTGTCTGTAGATTA |
| | | | | AGAACAATCCTGCCAAAAATACCTATTGGGCTTACCTTAACTAATTA |
| | | | | CATCTGTCTTGAAGGTGGCACGGACAGGAAGAGTAGCACTGAGTA |
| | | | | GAGAGTCTGGGGTCGATTCTACATCTTTACGTGGATACGCTCTTCCA |
| | | | | TTGTACGAATAAAAAATCTCCGGCTATGTCTTTCCGTCATTATCATGT |
| | | | | CCAATTTCCTTCAGCACGTCTGCACTACATTTACATAGCGACCAATT |
| | | | | GCCCGTCAACCAGAGTGAAGGAAAGCAGTAATTCTGATCTTTGCTT |
| | | | | AGAACATGCTATTTTGTATAATAGGAATAATTTTGTATTGGTTGTAT |
| | | | | TTGCTCAACACCCTGTAGTAACATTATTACCTCGAGTTCGAATATAT |
| | | | | GAAACATAGTTTTTCTCTTAAATGCGTTGAGAACATTAGTACGGCCC |
| | | | | CTTGGCCGGCTGACACGAATTAATCGAGAAGGAATTAGGACTGTAA |
| | | | | ACAATTCCAAATACTAGTGTTTTCTCGTACTGGGAAAACAAAAGCTT |
| | | | | TTACTCGACTTCTTAGCTTTCGTAGTAGCATTTTGCAATAATTTCCGA |
| | | | | AATCATAACTTCAACAAACTCGCCATCACAATTCACACCGAGCAATG |
| | | | | TTTGATGCATCGATCTTATAATCAAACGAGGATATACAATGGGGCA |
| | | | | TAGGATAAACACAGGAAACTATAATTTTATTACGAAAAATTCTACTA |
| | | | | TAAGCCTTTATAACGATCAATTACACATTAAACCTACTATAGAGGAT |
| | | | | GATCTATAAGTTTGTATATCACACAGAATCTAACAGCTCATTCACCA |
| | | | | ATTTCTCATTCCCGAGCGACAATGAGCTCAGAAGGAAAACCAGCAT |
| | | | | CCGAGGAATCTGTAGGAACCAGTATATCATCATCGGCTGTGAAGTC |
| | | | | GTAGTTTTGACCGATGGCTCTCAATAGTTGATACACTTCGAACATTG |
| | | | | TTGGCCTTTCCTTGTCGTTTAAGTTAACACAGTTACAAGCAACTTTAA |
| | | | | GGAACTGTGTTAGTTCGTTATCGACACTCTTGTCACGGAGAGACTTA |
| | | | | TCGATGGCAGAACGGCGATCGTTTTTTTCTGATAGTAGATGTATCCA |
| | | | | TTCTACCAAATTACCCTTGAAGGTTTCGGGGGCATTCGACACGTGA |
| | | | | GTTGGTTTTTCACCCGTGACTAGTTCCAAAAGAACAGTGCCGAAACT |
| | | | | ATAGACATCTCCCTTTGGAGTTGCTACAAGTTTTCTCGGGTATTCGG |
| | | | | GAGCTACATACCCAAGATCACCAAATTCTCCGTTAACGAAAGTGCTC |
| | | | | ATGTGGGTGTCAATCGGGTTCATGAGTCTTGCAAGACCGAAGTCGG |
| | | | | AGAGCTTGGGATTGAAATCCTCGTCCAACAAAATACATTTCGAGCTT |
| | | | | ATGTTTCTGTGGAGGATTCTAGGGTTGCAATTATGATGCATCCAAGC |
| | | | | CAACCCCTTAGCTGCGCCGATAGAAATTTTAAGCCTCAAAGGCCAAT |
| | | | | CCAAGCTCTTAGCCTCAGGATCTGAAGGGTGAAGCCTATCGTAGAG |
| | | | | GTTTCCGTTTGCCATATATTTGTAGACCAAGAACCTCTCTTTCTTTGC |
| | | | | TGTGCAGAAGCCCAACAGCGGTACCAAGTTTTGGTGCTTCACACTTC |
| | | | | CGAGAGTGTTCATCTCAGACAAAAATTCTTTCTCTGTCCGCTGTGAA |
| | | | | TCTTGCAATCTTTTAACCGTAAGGAGCGTTCCATCAGGCATCATCGC |
| | | | | CTTGTACATCGTTCCCATTCTTCCAGAACCGATCATATTGTTGTTGCT |
| | | | | GAAGCTATTAGTGGCTTTCATGAGGTCATCCAAACTCATTTTCGAAA |
| | | | | TTGTCTTCTCGAACATAGAAACCTGAATATCAAGAAAAACATTCTAC |
| | | | | ATTACACACGCGTATAAAGAATGGAAAATCAGTAACAAACTACTCC |
| | | | | TGTCTCACACTACAAGTCGCATACATAAATATAGTATTGTCGGATTT |
| | | | | CAGCAAAGAGTTATTGTTATCGGTCAAACAGGAGAGCTCACCAAAA |
| | | | | GACTAGCTTATTAGGTGAGAGCCATTTGCCTATAAACCCCACACCAA |
| | | | | TTGCATACACAACCGATGTGGGACAAGTTCCATACCCTGCAATGGA |
| | | | | CCATAAATCGACCCCCATAAGGCCAACGTCCTTGTTGGGTCACGGG |
| | | | | ATGACACAACACAGAGCCTACAACCAACAACAAACA |
| 1704 | Amaranthus | gDNA | 5448 | GGTCACATTTTAACGGGTCATCAACGGATTAGGTTAATAAAGGGTC |
| | palmeri | Contig | | GGGCCATTAACGGGCCTTGGTGTAAAGGGTTGGGCAGAGCCGGGT |
| | | | | CAAATAATTATAGGAATTGGTTGCAACATTTTTTTTTTCCACTTTTTG |
| | | | | TTTTTATATTTTAGATATTATATACAAAGTTAGGTTGACCCAATGGG |
| | | | | CCATAAAGTTGAATAAAAAAAACTATTACATGAACCTTTAAAAACG |
| | | | | GGTCAAAGTGGGCCTGGTTTAAACGAGCTTTGACCCGTCCTGCCCC |
| | | | | GTTGAAATTTGACATGACCCTCCCCGCCTCGCCCTATTTAAATTTAGC |
| | | | | TCCATCCCGGCCCATTGAACACATCTATTCCTAAAATAACTAACATTA |
| | | | | TGATGGCTCATCCTATTCGCTACCATGCATGTAAATGTACACAGTGT |
| | | | | CTATCCGTTTATCCTTTTTTATATCCCTGTATACCATTTGTGACTAACG |
| | | | | GTATTAATTTTTTATCTTCCTTGTAGGTTGAAGATCTATCTAGAGAGC |
| | | | | CTCAAGTGGAACGTGAACTTATGCTTTTAAAGCTTCATTCTAATGCA |
| | | | | GATACCCATGCTGAGGTAGTTCCACCAGTTCAAATAATTATATCCTG |
| | | | | AACGCTATATAATTCATGAATCTTTTATTTTCCTCTTAGAATCATCAG |
| | | | | CTACAAGAAGTTAGATAAAGATGAGCAAATGTTCAAAAATATGCTA |
| | | | | TAACATCATGTGCTTTGTAAGCTTTAAACTTAGAGATAACAAAAATA |
| | | | | CTTAAGAATACATCATGGGTATGTAGCTGAAGATCAAATGGGAAGT |
| | | | | TACATTGCTTCTTTGTGTGTATTGTAAACAATCTGGTATCGTATAAGT |
| | | | | CCAAATTCCATTTTTTGATTTTCAGATAATGTGGTTAGTGGACATCTT |
| | | | | CAGGGCAAAAATTGTCGATATGTCGGAAAGCTTCGTTACTGTAGAG |
| | | | | GTTAGTATGTTTGTGGTTGACATCTTGTGTACCTATCTTCCGTTCAAT |
| | | | | GTAGATTCTTTTTCTTAGTGCTATTTTATTTTCTGTCGTGCAGGTGAC |
| | | | | TGGCGATCCTGGAAAGATGGCTGCTGTCCTGAGAAATTTTAGCAAG |
| | | | | TATGGAATCAAAGAAGTTGCCAGAACAGGAAAGGTCAGTCTTTTAG |
| | | | | ACAATTGCAGTAAATTCACCGGAATACTATGAATGATGCAAAGATT |
| | | | | ACGTGCGGTAAATCGTAAACAGGCTGTTGAATCTCTTCAACTAAATT |
| | | | | ATATCTAATGCGAAGTGCGTTTATTCAACTACCTTTTTTGTGTGAAAT |
| | | | | GATAGATTGCTCTAAGACGAGAAAGGATGGGCGAGACAGCTCCTTT |
| | | | | TTGGAGATTCTCTGCTGCATCTTATCCAGATCTAGAAGAAAAGGCTG |
| | | | | TTGAATCTTTTGTCAGGCCTGCAAAAAGAAGCATCAATGCTGATCCT |
| | | | | GGCTCATCGTCTAGTGTAAGTGAAGTTTTATTTGCTCAACATTTATCT |
| | | | | TATCCTTCTCTTACTTTGTCTTGCATTAGCGTATATTCTTTTTGGTAAT |
| | | | | TACAAATTTAGTTTTTTTTAAATGTTCCTAGGGTGATGTTATTATTGA |
| | | | | CATTGATAAATATTCTTATTGGTAGTATATAGATATATTATATTTCCC |
| | | | | ATAGATTGCTCTAAGACAGGTGGCGTATATCCGCCCGTCCGAAACC |
| | | | | CCGCCAAGTCTCATACGGGCATACGGCCCGTTTGGTAACTGGCAAT |
| | | | | GATAATGAATGTTAGTATAATTTTGGTAAGAATATCTTCTCATAAAC |
| | | | | TTAATGACTTTACTTATTCTCCTTCAACAAGCTCATTTTCCTTACAAAA |
| | | | | TTCTTTATAATGCATCACCACTTAAACCTGTGGTATAAGGTGGTACT |
| | | | | GAAATATTGTGAACAAAAACACTTTTTTATTATTAAAATTTCATTACC |
| | | | | ATAGTGATGACATGATACATATTATGAAGATTTACACTACAAATCAT |
| | | | | TCCCATTACCACCATTTAGAACCATTAGCCTAACGGGCAGTTAATGC |
| | | | | ATTGGGATAATGGAGTGGAAAAAACGTTAATTGTCATTTATGAACT |
| | | | | CAATTTTTTGTTTTGGGTTTGGCACTTTTGCATTTGGAATTTAAAATG |
| | | | | CGTTTATTCAATGAAGGGTGATGTTTATCCAGTGGAGCCTTATGATG |
| | | | | CCTCCATAAATACAGTACTTGATGCTCACTGGGGAGTTCTTTACGAA |
| | | | | GATGATGTAAGTTCTCTTTGTCACTACCTGAATTTTGTTCATCTTGTT |
| | | | | GCACACTTTCATATGATGTGATCTTCAGATCTTTTACTTAATTTACTA |
| | | | | AATGGCTTCATAATTTTCCCAGAATGGCCTAAAATTCGTTAGTTTCG |
| | | | | GTTCATAATTATTTAAGTCATGTCAAACTTTCCTTAAGACCGGCTCTA |
| | | | | TCGAATCTTTAGCCTTATTTGGGAGGTTCTGGTTAATGTCTTTCAATA |
| | | | | TTTGGCTTACTTGTTCATCCTCAGAACTTTCATATTTGTTTGATTTTAA |
| | | | | GCAACGTTATTAGAATTGAGATTCTACAACACTACGATTCTACCTAC |
| | | | | GATCTAGATTGCTCGCTTGTTTCGGATCGTATTATAGTAGAATTGTA |
| | | | | GATCAGAATCATGATTTTAATAACTATGGTTTTAAGAATGGAGTAGT |
| | | | | TTAATAAATCTGTTCTGTTAGTATTCTGATGTACTTTCAACATGCCAG |
| | | | | TCAAGCGGACTTGTGTCACATACTCTGTCCATGCTGGTAAATAATGC |
| | | | | TCCTGGAGTTCTGAACACCGTTACAGGAGTAATTGCTCGTAGAGGT |
| | | | | TATAACATTCAGGTCAGTACGGACTCTGACTGCACCATGAAAGTAT |
| | | | | ATCTCGTCTTTTGCATTATGTTAAGTTGATTGTCCCTTTTCCTTCTTCC |
| | | | | CAGAGTCTTGCTGTGGGCCCTGCTGAAAAGGAGGGTCTTTCTCGTA |
| | | | | TCACAACTGTTGTTCCTGGAAACGACGAGTCAATTGCAAAATTGGTT |
| | | | | CAGCAATTAAACAAATTAGTAGACCTTCATGAGGTGAGCATCTATTT |
| | | | | GCGTTCAACGTAGACATAATCGTCCAAATTAGTTAGTGTCATGTTTA |
| | | | | CTTATGTGTTAATATTATTTTGATTTTTGTTTTTTTGACTATTAACATG |
| | | | | CAAAACAGTACTTTACCTCTCTACTAACGTGTGCCGAGGCCCAAGGT |
| | | | | TTCTACCTAGGATCGATGAGAGGTTAAGATCGAAATCAATGCAACC |
| | | | | GGATCGTAGAATTGTATACATTAATTTGCTCAGCGTAACTGATCATC |
| | | | | AATTATATTTGTTATTTTTAGTGTTTTGAGGCGTAAGCCGTAAATCA |
| | | | | AAATTATTTGACTTCATCTATTAAGTTGTGAAAAATAACAATTTTAAT |
| | | | | AAGCATTGAAACTGCAAATCAAGAAAAATATGAATTTTATAGTCATA |
| | | | | TTGTTATAATAATTTTACATATGTTTATATATATTCGAATTCTAGATTT |
| | | | | TAAGATAAATTTTTTACGATTGAGACTACTCACATAGGAACTGATCG |
| | | | | TTGAATTGTAGGATCGTGAATCGTGTTATGATCTAACCCCCTAAATT |
| | | | | CTTGAGATAAGTGTGATGATACGATCCTACCAACTATAAGATCCCAC |
| | | | | CTACAATCCGGATTGATTGCCAATTTTTGGATCGTGGATTGGGATTG |
| | | | | GGATTCTGATAACCATGTCGAGGCCTAAAGAGAACAAAAGAGATG |
| | | | | AAAGGAGTTAACACCAATTCTTTAGCTTTGTGCTTGTATCAACAAAA |
| | | | | CACCATGCGAGATTCTTGTTATTCTAAAAGCCCTATTCAGCCCGTAC |
| | | | | CTATCATTTGTTTTATATCGAATCAGTGAAGCTAAGTCGAGTAACAT |
| | | | | TTTTCGTGTAATCTTTAATTGCGTAGATAATTCAGATATCTTGCACGC |
| | | | | TCTTCAATTCTCTACTATGGAGTTCTGATTGTCTTGTAGTTTGTATAT |
| | | | | AAGTACTACAATTATGATTGAAAGATTAGAACATCTTATTCCGGAAA |
| | | | | GGTTGTTGTCGCAGATTCAGGACCTTACGCACCAGCCATTTGCAGA |
| | | | | GCGAGAGCTTATGTTAATTAAAGTAGCGGCAAATACTTCGGCCAGG |
| | | | | AGAGACGTCCTTGATATTGCTAATATATTCCGTGCAAAACCTGTGGA |
| | | | | TGTTTCTGATCACACAATAACATTACAAGTAAGCATAAATGAATTTG |
| | | | | GTAGTTTATTTAGTCTTCTCTTGTTACTCTCAACAATGTCTATTCACA |
| | | | | AATTCTTGTGTGAGACGGTCTCACCGTGATACGTTCCCCATACATGG |
| | | | | ATTGAATAGCCCAACTAATACAATTATCAGCATATGAGCTTCAATTA |
| | | | | GTCTCTTACAAGAGTAAATCATGTCTATATCCTTATTTCGATGGTCCA |
| | | | | TTTCGAATTGAAACGAATATAAATAAAAAGCTAATGGAATGCGAGT |
| | | | | ATTTCACTAATAACGAAAACCGTAGGGAGCTAAGACAGTTTACGGT |
| | | | | ATTGAGGATCTCTGTAATTTGTCTTTGTTTTTTTCAGCTTGCCGGTGA |
| | | | | TTTAGACAAAATGGTTGCGCTACAGAGATTATTGGAGCCTTACGGC |
| | | | | ATCTGTGAGGTATGTTTATATGCATATTTATTTCTCCCGAAACCGATT |
| | | | | AGAATCATTTCATGTGTTCGGGTCAAATAGGAAATATATGGCCATTT |
| | | | | GTAGCTTTTCAATAGACTCCGAGAAGGCGAGAACCCTTATCTCCTTA |
| | | | | ACTACTAAAACATTTACAGCTCGTTGATTGTCGGTAATAAAAGGTGA |
| | | | | TATTGAGAATAATTTGTAGTGTAAATTTTTCATGATTGTATTATATCA |
| | | | | TTCCCTGGGTAATGAATAGTTAATCATAAAAAAACTTTTTTTTTCGCA |
| | | | | ATTTTTCATTACCATTTGTGTCACCTCTACGAATGGTAATGCATATGA |
| | | | | TTGATTGAATGAGCTTTATGAAGGAAATAAGATGATTGAAGTAAAT |
| | | | | CAATCAAGATCGTTAAACTTGTAAAGAGATTTTCTCACCAAACTTAC |
| | | | | TCTAAATTTCATTTCCATTTCCACTATTCAATACCGATAACTAAACGG |
| | | | | GCATCAGCACCATTTAGTCGAGTACTTGATTTCAATTCAATTTAATTC |
| | | | | AGTTCAGTTTAGTTGTAAGTAGTTCTGGAGATAGCGAACTTCAATG |
| | | | | ATCATGGACTGACTGTAACATTTTATATCTGTCTTCAAGGTGGCACG |
| | | | | GACTGGAAGAGTAGCACTAGCTCGAGAGTCTAGGGTAGATTCCAA |
| | | | | GTATTTACGAGGATACACTCTTCCGTTGTATGAATGAAAAACTCCGG |
| | | | | CTATGTCTTTCCGACATTACCTTGTCCGATTCCTTCCGCTCTTCTACAC |
| | | | | TGCATTACGGGCAGAACAATTGCCCACGAGTAGAGTAAATTAAAAG |
| | | | | GGAGAAGCAACAATACCGATCTTTGCTTTGAAGATTGTATAACAAT |
| | | | | AGAGTTTGTATTTGATTAGTATTTATTTGCTCAACGTTGTAATTACAA |
| | | | | TTCATCTTGAGGTTTTGATTTAGCATTGTACCCGGGCTAAGATAACC |
| | | | | TAGTTGTTTCAAAAAAAAAAAAAAAA |
| 1705 | Amaranthus | gDNA | 5396 | AATCTGGTATATTTTTCATTGATTTGTGTGTGTTGTTGCTTCTTGCAT |
| | palmeri | Contig | | GTTATTTGTTCTTCCGTTTGATTTTTATACAAGAGAGCGTGCAAATTT |
| | | | | TAGCATGTTGTCAGTTCTTAAATTGATCACTGTCTGTATTTTGTTAGT |
| | | | | CTACCCCATTAAAACGACTCACTAAATCACTTTTTTTATTTGGGTGAA |
| | | | | GATGTTTATGATCTTTGCTACAAAGATTTAATCGGAAATAATTTCTA |
| | | | | GTTATTATCACTAATAAGGGTAAGATCGTATACATTAGACTCCAAAC |
| | | | | CCCGGCCGTAATAGAATTGGGGTAATGATTAAGGTAATGAAATGTT |
| | | | | GTTGCCTGTATTTTTGTAATGAATTCCAAACAGGCTGTTAAATATAG |
| | | | | ATACTTTCCCTGTAAAAATACAAGAGTTTATAAGGCTCTTATTCAAC |
| | | | | CCAACATAAGTTTATTGAAAGATTTATTAGTAGTCTTTTTGTGATTCG |
| | | | | TAACCTTGTAATTACCAAGTACAGCTCTTTATTTCTATGACATTGAAA |
| | | | | CCGTCTGCAATCAAATTGACCTAGTGCTAAAAGCTGCTTGATTTGCT |
| | | | | TATTGCCTTAAGTGAAAATTTATAGCAAGCGTTTTGGAGGAAGAAA |
| | | | | AGCAAAAAGATCGATATGCTTTCATGTCTTCAGAAAATTAGTTCCGA |
| | | | | AAGTTGTGGAGTATAATAGAGTTCAACTATTGTGCATGTAAAATATT |
| | | | | AATCTCAAGTAATTCTGATAGAAGACCATCTGGGAAGATTTAATTA |
| | | | | GTGCTAATCTGGGAGGAATTATTAAGATTAGTCAGTAATCTGGCAA |
| | | | | CATTTATCTAGGAGGATAGAAAAGGCATTGACCGTATGTAGTAATA |
| | | | | TTAGTGCATGGGAAGTTCACGTGCAGTTGGAAGACACTTTTCCGTT |
| | | | | ATAAAGGGTCATTATGAAATAGTGGACACGTGTTAGTAGGAGAAG |
| | | | | CTAAGAGCGCCATAGAAAATAAAGGAAAAACCATTAAAGTAATTAA |
| | | | | GGGCTTGAAACAACCAAAACAAGCACAGTGGCCTGTGGAGAATTTT |
| | | | | GGGGATTAATTTCTTTCTCTTCCAACATTATAATGTCAATTTATGTCA |
| | | | | TTTGTGCTAAAGTGACACTTAATGTACCCTATCTTCCTTCGACTTAAT |
| | | | | TTAAACTATCGTGACTTCAACTCTTATCTTTATTGTTATAACCTAGCTT |
| | | | | CTACCCATTACGCGAGTTCATTTTCATCTACCTTTATATAGCTTATCA |
| | | | | TTAATATGTTCTCATAATAATTCAAAAGTTTGCATCTATCTAATTTTA |
| | | | | GAGCTACAAGTGTTGCTTGTAGTAATTGTGTGTCGTTAGATTGTAGT |
| | | | | GCGTGAACTATCCATTTTTCGTGAACTGTTGCATTTCTTGAATGACTT |
| | | | | GTCTCTAGAATGATGCTCCTTAAACTTACTTCTTTTGTATCATGTATG |
| | | | | TTTAAGGGAGAGACGACATACAATATCAGTATTTGTGGGGGATGAA |
| | | | | AGTGGAATGATTAATCGAATAGCAGGGGTTTTTGCCAGAAGAGGTT |
| | | | | ATAATATCGAATCACTCGCTGTTGGATTGAACAAGGACAAAGCTCT |
| | | | | CTTCACTATTGTAGTTTCTGGAACGGATAATGTGTTGCAGCAAGTGA |
| | | | | TGGAACAGCTTCAAAAGCTTGTCAATGTTTTGAAGGTTATTTTCCTTT |
| | | | | TGAATAATTACCGTGGCATCCATGTCTTCAATTGTTTAGAATTCTCAT |
| | | | | CACTAAGCACAACTTGTACATTTAGGTTGAAGATATATCCAAGGAG |
| | | | | CCTCAAGTAGAACGTGAATTGATGCTTGTAAAAGTTGGAGCTGATC |
| | | | | GGAATAACCGTGCTGAGGTACCTAATAATATATGTCAAAATACCCA |
| | | | | ACTGTACAAAAGAGTTGATCTTATTAGATACAGGCAGATATGTTAG |
| | | | | CTACAGCCTACATCTCTATGTTTTTTGTGGCAACTTTCTGCTACATGC |
| | | | | CGATCTTTCTTAGTTTTCTCCTAGTGAATTGTAATTTTTAATATATAAT |
| | | | | TTGTTATTCCACTATGTCTGTTCCTGATTTACTTTCGCTGATCACATC |
| | | | | GTTCGTGTTTCTTCTATTGTAGCTGATGTGGTTGGTGGACATCTTTC |
| | | | | GTGCCAAAATTGTGGACATATCGGAAGAGTATCTTTCAATAGAGGT |
| | | | | AATCACAGGATATTTCATAAAATCAATGTTAATTTTGGGAATATTGG |
| | | | | GAATATTGTGACAAGTATCAATGTTTTATGTACAGGTTAAGTGTTTA |
| | | | | ATTTGCATTTTCCACAAGCTACTTCATCCTCTTCTCCGAAGATGTGTA |
| | | | | AAATTGTAATATACATATTCACACCAATTTTAAAATTTTGGAAGAGC |
| | | | | GACATACAAATGATTTATGACCTAATTTTGCTGTATATATACATGCTT |
| | | | | ATATTTTCTTCAAACAGCTTTAGAAAATTGATTATATTTTTCCTCCTTC |
| | | | | AAAGAAAACAAGTTTTGTGAGATAAAAGCTACATGTTTAGTAAGCA |
| | | | | AATTTAATGAAGACTGATGAAAACAAAATTTGTACTTTTGAATGGTT |
| | | | | TTATATATTTTATGATCTTTGTAAGCTAATATGGAAACTATAAGATTG |
| | | | | TAGTTGGTTTTCTTTAGCTCTTTTCGCTTTTACCTTTCATTTTTTTTTAC |
| | | | | ATGCTTAAAAAAGCGACTCACCTAGTACTTTGATATCCAGGTCACTG |
| | | | | GAGATCCAGGAAAGATGGTTGCTGTCCTTAGAAACCTAAGCAAGTT |
| | | | | TGGCATCAAAGAAATTGCTCGTACCGGAAAGGTTTACTAATTTTTTT |
| | | | | TGTAAATTTTTCATTGTTGTTTAAGAGATCTTTTAGTTTCCACATTGC |
| | | | | ATAATAAATGTGAATGCCTTTTGTTTATTGCTTGTCCAGGGTTTTTAT |
| | | | | ATTTTTTTAAGATGTAAAGTTTAATATCTAACAGATTGCTCTAAGAA |
| | | | | GGGAAAAATTGGGCGAGTCTGCTCCTTTCTGGCGTTTTTCTGCTGCT |
| | | | | TCTTATCCTGATCTTGAAGAAGCTATCCCTATGGATTCTCTTTCTGGA |
| | | | | GTTGCAAAAGCAGCAACTGCTGCTGGATCATCGGATTCGTCTGTGG |
| | | | | AGGTGTGTTTCTTATTTGTCCAAAATTAAGTGTCCAAGTGTCGTGCC |
| | | | | CAAGTCCGAATATCGAGGATCAGACATGGGTACTTGAGTTAAAATG |
| | | | | AAGAGTCCGGGTAACAAATGTAATTGATTTAAAAACATATAGTTGC |
| | | | | CGGATTTTAAAATTTTTTTAAAGGTAGTTGGAAAATTTTCCTTTTATT |
| | | | | GGAAAAACTTTTGGAGGACAATATTTTTGTGAATGTGTCTCGAGTG |
| | | | | CCTCTTATGTTAAAGGGCCTCAAGACGAATAGGAAATGGCGGGCG |
| | | | | GGTCGAATGCGGGTGTGCAGGCTGGTTGCTGGCAATGTTTCCGCA |
| | | | | GGCTGTTGTTGGTGTGCTTTTCACTTCAGTAGCAATTTACAGCAAAT |
| | | | | TAGTAGCAAATTTACAGCAAATTTACAGCAGAATGTTAGCTCAATAA |
| | | | | CCCATCATGACATAAATATTAATGTATAACATAACTTTAACTACAAA |
| | | | | ATACAATTTAGAATCATCAAATCACAATTTAGTTGTTTAATATACATT |
| | | | | AAAATATTTCTTTGTAGGAACTTCAATTCTATCTCTTAGTAGCATAAA |
| | | | | TTTTACAATCAAACGCAACAAAAGTATTAAGTTAGAAAGGGAGTAC |
| | | | | TGCATGTGGATTGTCTCAGCTAAAGTGCTGCAGCAGCTTTGCACATT |
| | | | | ATCTAGTGAGACATTGGAAATGATTAGGAGCTTTGGGATAAATATG |
| | | | | TACAGAAACACTTCTCTTCTTGCCATCCCAAGGATACTGCAGCTTCA |
| | | | | GGAAAATGAAGGTCCTGTATGATTTTTAGAAACTCCACCAAATTCTG |
| | | | | AAGATTAAGCTCACCTCCGTACCTAACATTGAGATATCTTCAGTATA |
| | | | | TTCGCACCTACCTGATACCTTGCTATGAGATCTCTGTTAATCAGCTTC |
| | | | | ACTAAGACAAGCCAAAATTTCTAACTAGAAGTCATTTTCTGCAAATT |
| | | | | TTAATGCAGATTCCAGAACTACCCATTATCATTAAACTTGAATATTTC |
| | | | | CCCTTTTTATAACATTTCTGATGCCTCTTGTATGCTAATCTTTTCTAAC |
| | | | | TATATACACTACCACAAAACACAAATCTATACTTACTCTAAATAAGTT |
| | | | | TAGTATGAATTACATTTTATTTTTAGTGACTACGACTTAGAAGTATAT |
| | | | | CTTAGACAACTTACATTGTAGATTAATATGACATAATTTGTTTCTTCA |
| | | | | AAATAAAAAATGACATAATATGTTATCAATCTAGACCTCCTCAAGAC |
| | | | | AAGTATGATAAAAAAAAACTCCAATGCAACAAAAATTAATTGATTTT |
| | | | | TTTGAAAAAAGATAGAAGAAAGTGGAAGAGGCAACACAAGTAAAG |
| | | | | AAGGCTTCTCGATCCTCTGAGCACTCTAAACCTTGCAATACAGTAAA |
| | | | | CTATAAATAAAAACAACAAAGTTCAGATATCATCTCAATATTTTCCC |
| | | | | CAAAAAAGGTTCAACATCATCTTCTTCCTCTTCTTCCACAATCTCATT |
| | | | | GTCATGTTCATCTAAAAGCCTATCCTTGTCCTCAATGGTGTTGTGCA |
| | | | | TAGCACGCCTTGGAGGCACACCAACACTTGCACTGCCTTTGACTTCA |
| | | | | AGAACTTTGAGTAGCAACAATCGTCTTATCACCTTGGCCAAAGGGA |
| | | | | GATTTGGAAGTCATAATACTCACTGGAATGTATATAAAATGACTATA |
| | | | | ATATTAAAAGACAATGAAAATGATTTTTGTGCATTTAAAAAGATGTT |
| | | | | TTCAAGTGACTATTTTTGGGTTTATCTTTTCTATTTCTTCTCTCTCTTT |
| | | | | ACTTGGACCCTTTTCTTCCTATTGCAACTTGGATCTTTCAGATTGGAC |
| | | | | ACTCTCTTTGTGGCTATATGATGTTTTCTAAGCTCTATAAGTATCTTT |
| | | | | GCTCTACAACTTTCTTGCCTTATTCTTCTATTACCATCTCCCACATACT |
| | | | | CCCAATATTATTACTTAAAGAATTTTGGCTGCTTGTACAAGTATGTTT |
| | | | | GGTCCTTGAACTACATTCTGTCTCCCCCCTTCCATTGTATTTTCTATTA |
| | | | | CGGGTTTTCTGAAAATGTCCTCCCTGCCCTTATTTGTCATTTATGGCT |
| | | | | ACATGACTTGATCATTGCACTATATGATGGAAATTTAAGCAGTATTG |
| | | | | TTGTAGTTGTACTTTTTTGATGAATCATCATGTCTGCTTCTGAATTGG |
| | | | | ACTCACTTCAATATCTTGAAGGTTTTTTTCCTCTATTTTTTAGGGTGA |
| | | | | TGTTTATCCTGTGGAGCCGTTTGATGGTTTCTCCCCTCCAATCTTAGA |
| | | | | TGCTCATTGGGGTATTTTGAATGAAGAAGATGTAAGCGACTTTCCTT |
| | | | | TCTCTTTTATTTATCTCGGGTTGTTATTTTTTAGTTCCATTGTTTGCCT |
| | | | | TTCGTGTTCATTTTCGATATAAATAGTTTTATCATGCTTCAGTTTCAA |
| | | | | ATTTTAATGGATA |
| 1706 | Amaranthus | gDNA | 5223 | ATAATATTATCTTTTTGGAATAATATAATTAAAAGCAACAAACAAAA |
| | palmeri | Contig | | TGTATAAATTTAACTAATATACTTAATTCAAAAAAAAAAATAAATTC |
| | | | | AATTAATATACCAGTAAGCAGTAAGTGTGTTTCGCATTTCAGTATTT |
| | | | | GAATAATATTATCTTTTTGGAATGATTATAATTAAAAGCAACAAAAG |
| | | | | TTATAATTTTAATTAATATATATACAAGTAAGTGTGTTTTGCATTTCA |
| | | | | ATATTTCAATAAAAAATTATAAGTGAGTTGTCTATTTATAATAAAAT |
| | | | | AAATAATGCACTACTCATATTCTTCTTCAAAAAAATCCTCACTACCAT |
| | | | | CTCCATTGTCCCCATTTCATTTCTTTCTCATATCTCTCCAATGGCGGCC |
| | | | | ATTTCCTTTAACATTAATGGCGGAAAGATTGGAACTTTATGTCCAAA |
| | | | | ACCTAAATATGGTTGTGGGTTTTTGAGAAAATGGGATTTTGGAGCT |
| | | | | CATTCAACTGTATCTACAAAACCCATGTCAAAAATTTTAAGCTTGAA |
| | | | | AGCAGTTGAAGTTTCTGCTGATGCTACAGTAAATGCAGTTTCTGTTT |
| | | | | CAGCTAATTCTAGGTAATGTACTTAATTAATATTACCATTTTTCATTG |
| | | | | AATCTAAACTTTTTTTCTTCATGTGGAATTGTGGATATAGGAGTATG |
| | | | | TATGGAAAGAAATATAAGGGTTTTTGCTTCTTTATTGGTGTTTGTTT |
| | | | | AAAAAATTGTATGGTTGCATACTTTTGTGATTATTCATTTATTCTGAG |
| | | | | CATGTTTAACATGTTCGATTGTACAACCTCTAAAAAATTGAATGCAA |
| | | | | AAGATACAAAATTGTTAGAAAATATCATAATTTTTAAAATTTCATGG |
| | | | | GGTCTTAAAATAATTGAAATTTTCAATTTTTGCTCCGGCCCTGATCCT |
| | | | | CCTAAAGCTCACTCTATAAGGAGTCACCAAAAAGTAAAGTTGAGTA |
| | | | | TAATAGTCATGTGACTCTAATTTTAGCCTAGGTGGAAGAAATAGGG |
| | | | | TCAAGGTCAATGGAATGTTGTTTGTTTGTTTGTTTGTTCTGGTATCAT |
| | | | | TACAATTTACAGATATGAAGTTAATAAGGTTTTGGATTATATTGTAC |
| | | | | CATATTAAATTGGCTTATTAGACTATGTGTACTTTTATTTATGTGAAA |
| | | | | TTGAGATGATGTTTGCTGCCAAACGCCAATCGAAAACAGATATATA |
| | | | | CTATCATTAACAAGGGTAAATGTGAGGTTATTTGATGGCATTGAGG |
| | | | | TGATATAACATTGTATGAAGTTGCAAATTATGAAGCTTAATCTTGTA |
| | | | | TTAAGTGGGAGATAGAGCATCTTTTGGTTGTGATGTTATAACTTTAG |
| | | | | TTGGATTTTGTAAGTGTTGTTGCAAGTTATTCATGAATTAAGGAGAT |
| | | | | GTGCCTTTCTATGTGAATCACATATGTAAGAAGTAGTTTATGTGTTT |
| | | | | GTTGATCTTTATACTGTATGATGGCCGATTCAAATGTGGAAGTTGAT |
| | | | | ATGATCCTTTTAAGGTCTACTGAGAAGTTGTTCTTCAATTCATTATAT |
| | | | | TATCCTTGGTTTTCGACCATAGGAGGTCACATGTTCGAATCTAGCCT |
| | | | | CATATATAACATATCTTGAGGCTTCAACCATCAACTTAAACTTTGATT |
| | | | | GAGTTGCTTCCCTGTGACTTTCTCGCCTTCGCTTCACCTTTATGCTTG |
| | | | | GTTTCAGCCTTGCTAAGTTGCTAGTCGTGGAGAGGGTTACTTCAAG |
| | | | | AAGGGTGTCAGCATATATCACTGCAGATTTTTTTGAATACAAAATCG |
| | | | | TTTTTAAAGAAATCATACATGGTTATCTTACTGCTCCTTGATTCGATG |
| | | | | GAGCAAAGTTTTGTTGTTATTTGATTTCCGATTATAATGGATCATTG |
| | | | | TAAAACGACTCTTTAAATTCTGCGCACTTCTTATTTATGTAAAGTTGC |
| | | | | AAATGATGTTTGCTATATATGTGGTTATCTTATTGTATCTTGTTATTT |
| | | | | ATTCTCAGGTAATGAAACAGAATTCAAACTCTAATGACATTTCATAT |
| | | | | ATTTCATTTTGTGTATACAGGGTGATGCGTCACACAATTTCTGTCTTT |
| | | | | GTCGGGGATGAAAGTGGGATAATCAATAGGATTGCAGGTGTTATTT |
| | | | | CTAGAAGAGGATACAATATCGAGTCTTTGGCTGTTTGTTTAAACAA |
| | | | | GGATAAGGCTCTTTTTACTATAGAAGTGTGTGGAACTGACAAGGTG |
| | | | | TTGCGCCAAGTCGTGGAACAGCTTAACAAGCTTGTTAGTGTTTTGAA |
| | | | | GGTAGTTAATTTCCTTTGTTCTTCCTTTTATTGGTAAATGGTGATAGT |
| | | | | GATACCCTTGTAACATAAATCTTCGAATAATGAGACTATGACATAGT |
| | | | | GCTTGGTTCACCACTTTACGGATTGCGTTCGATAAAATTACTTTATG |
| | | | | AGGTCTAATGAACCCGTTTTCCAAACTAGCTTATACAAACTAAACAT |
| | | | | ATCCTGAATTTGTTTTTTACTAAAATAAAAAAAAATTCTTTTAATATG |
| | | | | GAGCGTTACGTATCAATCAATATAATGGATCATCTTATATGCATATG |
| | | | | TTTGTACAATGTACATTTTTTGTTAGATTGTCTATTTGTCCTGATAAC |
| | | | | AACCTTGGATGATTCTTGTATTTCTTGTAGGTTGAAGATCTATCGAG |
| | | | | AGAGCCACAAGTGGAACGTGAACTGATGCTTGTAAAGCTTAATTCT |
| | | | | GATGCAAATTCCCACGCAGAGGTAGTTCCAAAAATTCAATGATAAT |
| | | | | TTATGAATGGTATATTTTCCACTTTTTAAGTTCTAATTTCCTCGGCTG |
| | | | | TTGTCAGTTAGAGTCTAGCAAGGAAAAAGATAGAGATGTTTTGCTT |
| | | | | TAGATTTTATCGATGATCGAGAAAGATGCTATACTTCATATAAGGCC |
| | | | | ATGACTGTTACAACAACAACGCCAGAGCTTTAGTCCCAAAAGTTCAT |
| | | | | GGCTGTTAGATAGTTTAAATTTAACTAGAAGTACATCGTGTTGTGTG |
| | | | | AAGCTCGTATAAGAAATTGCATTAGTGTCTTTGTGAGAAATCTAATA |
| | | | | CCGATTAACGTAAATTTTTAATTTTTGATCTTCAGCTAATGTGGCTAG |
| | | | | TGGACATCTTCAGGGCAAAAATTGTGGATATCTCAGAAAGCTTGGT |
| | | | | CACTGTTGAGGTTAGTGGTATATTTGTTTGACTTCTCGCGTATCTCTT |
| | | | | CTATGTTTGCTGAATTAAGTCCGATTTTTTTGGATTTGCTTCCATGAT |
| | | | | AAATGCAAGAAATTTACCTACAAGAAGTTGACCATTTTCCTCCGGTC |
| | | | | GATGTAAAATCTTTTTCCTTATTGGCATTTTCTTTGGTGCTGTGCAGG |
| | | | | TGACCGGAGATCCTGGAAAGTTGGCTGCTGTCCTAAGAAATTTTAG |
| | | | | AAAGTTTGGAATCAAAGAAATTGCAAGGACCGGAAAGGTTAGTCTT |
| | | | | TTAGACATTTGCAGTAAATTCAGCATAGAATTCGGAAAGCCGCAAA |
| | | | | GAGCACATGTCAACTATTGTGGCTAGCCAGCCAACTATTATGCATTT |
| | | | | CTGGTGAGATCAATGTGAAACAAGTTTAGCTAACTACTTGTTTTGTT |
| | | | | TTATACTTAATATGATAGATTGCTCTAAGGCGAGAAAAGATGGGTC |
| | | | | AGACGGCTCCTTTTTGGAGATTCTCTGCTGCTTCTTATCCAGATCTAC |
| | | | | AAGAAAAGGCTGTTGATGCTCTGGCCAAGCCTACGAAACGGAGTAT |
| | | | | CAATGGTGATTCTGGCTCATCTTCAAGTGTAAGTGATATTTTATCTTC |
| | | | | TCGACAATTATCTTTTTCCTTTTCTTACCTTGCATTGCCTATGTATACT |
| | | | | TCGTTCACCTTGTATTGCCTATAGACTTAAACATGCTTTTATTTTTGA |
| | | | | AGGGTGATGTTTATCCGGTGGAACCTTATGATGGTTCGATGGTTAA |
| | | | | TCAAGTGCTTGATGCTCACTGGGGCGTACTTTATGATGGTGATGTA |
| | | | | AGTGCTCTATCACTACCTGAATTTTTTGTCACTAGGTTGTCCAACGG |
| | | | | TCCATGTGATGTCATGTTCAAATCGCTTAGCCCAGTGTTTTCTAATAT |
| | | | | AGCTCCAAATTAATTGTCTGGATTCACGATTCACCCAAAATGGCCTA |
| | | | | AATTTTTTCGTTTTAATTTACAATTGTCCAAGTCATGTCAAACATGTA |
| | | | | TTAAGGTCTAAACTCTGCTCTGTTACTTGGACTCGGGTACTGAGTCG |
| | | | | GCAACGTGTCCAAGTGTCGTATGCGTCTAAATATTCAATTTTACGCT |
| | | | | TAAAATGAAGTATCTAAGTGTCATACCAATGTCCGGGCATCAAGGA |
| | | | | ACGGACATAGGTACGTGAAGCAAAATGAAGAGTCCGAGTAATAGC |
| | | | | GTTTCAGCCTCCTTTGAATTTTGGAGGGTTAAAGTTTATGTTTTTGG |
| | | | | GTTTTCAGATGTTCGTCTTTCTGTTATTCATGTTTAATTTTAAGAATG |
| | | | | AAAGGTAGTTCGACTTTTCAGTTTTTTGAGCTGCACAGTACTATAAA |
| | | | | TTGGTTTTAGTTTGCTCTGCTAGTATCATGAATTGCTTCGTTCTTCAT |
| | | | | GCCAGTCAAGTGGTCTCCGGTCACATACGCTGTCCATGCTGGTAAA |
| | | | | TAATGTTCCCGGAGTTCTTAACACTGTTACAGGAGTAATTTCTCGTA |
| | | | | GGGGTTATAACATTCAGGTCAGTGTGGACTCTGACTACAGCAAGAA |
| | | | | AGTATATAAAGCCGTTTCTGTTGTGTAATGACAATCGTCCCCTTTTCA |
| | | | | TCCTCTTCAGAGTCTTGCTGTAGGCCCTGCTGAAAAGGAGGGTCTTT |
| | | | | CTCGTATCACAACTGTCATTCCTGGAAACGACGAGTCGATTGGAAA |
| | | | | ATTGGTTCAGCAATTTAACAAGTTAGTAGACCTTCATGAGGTGAGC |
| | | | | AACTATTTATGTACAAAACCGAATAGTTGTAATAAGTGGTATAGACT |
| | | | | ACATAGTAATAACTTTATGGTTGTAAGATGCAAAGTACCCTTATCAG |
| | | | | TTATCACTATAATATGTTCTAAGAAGCTCAAAACTGAAGTGGAAGA |
| | | | | GAAAATTGTGACATTGGTTAGCTCCGCGTTTATGACAAACTACTTGA |
| | | | | TTAATTCTTGTTTTTTTGAATGCTCAGTTCAATCTCCTTTGTAATATGT |
| | | | | TGATGCTCGTTAAGTTACCTATTTTCTTTGTAATACGTAAACCGTGAA |
| | | | | GTTGTGTTATCTTAGTCCAACGTCACATCGTGCTGCTCGAGTCATTT |
| | | | | GATTTAAAACGCTATTTATATTGAATAGTGTAACATATAACACAGAA |
| | | | | AAATAGTAGTCGGGTTGGTTCAACACACACAATAATTTCCCACATTC |
| | | | | TCCCTTGAATGAAAGATACGAGAATCTAACATCAGAATGGTTGC |
| 1707 | Amaranthus | gDNA | 4591 | AAATTAGTTGGTTAAAAAAACTTTTTGCTAAAACAAAATGTACTTTT |
| | palmeri | Contig | | CTAATACTCCTATCTAAAACCCCAACTAATACTAGTGTGTCTTCCTTT |
| | | | | GCACCCCGGTTGTCCTCGTCAGGCCGAGTTAGCTGTGTTTCAAATTT |
| | | | | CCATCCATGGAGGCTGTGTCGACTCACCTTTCAACGAGTTTTAACTC |
| | | | | CATTCCGAAAAGCAATAGACTGAACCACCAAACTGCAAAACGATTA |
| | | | | GGGTTCTCCTTGAAACCCCATTCGCTAGGTTTTAAGTTTAACTCCAAT |
| | | | | AGTGACAGGAATTCGGAGTTTGATAAACTGGTTGTATCTGCAAGCA |
| | | | | ATGTTGATCAACTGGGAAATCAAAGTAACTTATCCTTTAATCCCCCT |
| | | | | TCTTCCTCTCGATCAAAGTACGTTATTTTTCCCTTTTTTGATTAATTTT |
| | | | | CACAATGTATAATTTAGGTTTGGCTTGTTGTTTTATCTTCTACTAGTT |
| | | | | AATTTTGCTTTTCATTAATTATTGAATTTTGAAATGAAAATGAGTGAT |
| | | | | TATTTGATTTATGAGCAATTGTTGTCACTCGTGCCAGCCTGAAGGAT |
| | | | | TGGGAAAATTAGTCAATTATGAATCTGGTATATTTTTCATTGATTTAT |
| | | | | GTGTTCTGTTGCTTCTTGCATGTAATTTGTTCTTCCGTTTGATTTTTAT |
| | | | | ACAAGACAGCGTGCAAATTTTAGCATGTTTTCAGTTCTGAAATTGAT |
| | | | | CACAGCCTGTATTTTTTTAGTCTAAATTATAACGACTCATTAAATCAT |
| | | | | TTTTTTTATTTGGTGAAGATGTTTATGATCTTTGCTACAAAGATTTAA |
| | | | | TCGGAACTAATTTCTAGTTATTATCACTAATAAGGGTAAGATCGTAT |
| | | | | ACATTAGACTCCAAACCCCGGCCGTAATAGAATTGGGGTAATGATT |
| | | | | AAGGTAATGAAATGTTGTTGCCTGTATTTTTGTAATGAATTCCAAAC |
| | | | | AGGCTGTTAAATATAGATACTTTCCCTGTAAAAATACAAGAGTTTAT |
| | | | | AAGGCTCTTATTCAACCCAACATAAGTTTATTGAAAGATTTATTAGT |
| | | | | AGTCTTTTTGTGATTCGTAACCTTGTAATTACCAAGTACAGCTCTTTA |
| | | | | TTTCTATGACATTGAAACCGTCTGCAATCAAATTGACCTAGTGCTAA |
| | | | | AAGCTGCTTGATTTGCTTATTGCCTTAAGTGAAAATTTATAGCAAGT |
| | | | | GTTTTGGAGGAAGAAAAGAAAAAGATCGATATGCTTTCATGTCTTC |
| | | | | AGAAAACTAGTTCCGAAAGTTGTGGAGTACAATAGAGTTCAACTAT |
| | | | | TGCGCATGTAAAATATTAATCTCAAGTAATTCTGATAGAAGACCATC |
| | | | | TGGGAAGATTTAATTAGTGCTAATCTGGGAGGAATTATTAAGATTA |
| | | | | GTCAGTAATCTGGCAACATTTATCTAGGAGGATAGAAAAGGCATTG |
| | | | | ACCGTATGTAGTAATATTAGTGCATGGGAAGTTCACGTGCAGTTGG |
| | | | | AAGACACTTTTCCGTTATAAAGGGTCATTATGAAATAGTGGACACG |
| | | | | TGTTAGTAGGAGAAGCTAAGAGCGCCATAGAAAATAAAGGAAAAA |
| | | | | CCATTAAAGTAATTAAGGGCTGAAACGTCCAAAACAAGCACAGTGG |
| | | | | CCTGTGGAGAATTTTGGGGATTAATTTCTTTCTCTTCCAACATTATAA |
| | | | | TGTCAATCTATGTCATTTGTGCTAAAGTGACACTTAATGTACCCTATC |
| | | | | TTCCTTCGACTTAATTTAAACTATCGTGACTTCAACTCTTATCTTTATT |
| | | | | GTTATAACCTAGCTTCTACCCATTACGCGAGTTCACTTTCATCTACCT |
| | | | | TTATATAGCTTATCATTAATATGTTCTCATAATAATTCAAAAGTTTGC |
| | | | | ATCTATCTAATTTTAGAGCTACAAGTGTTGTTTGTAGTAATTGTGTG |
| | | | | TCGTTAGATTGTAGTGCGTGAACTATCTATTTTTCGTGAACTGTTGC |
| | | | | ATTTCTTGAATGACTTGTCTCTAGAATGATGCTCCTTAAACTTACTTC |
| | | | | TTTTGTATCATGTATGTTTAAGGGAGAGACGACATACAATATCAGTA |
| | | | | TTTGTGGGGGATGAAAGTGGAATGATTAATCGAATAGCAGGGGTT |
| | | | | TTTGCCAGAAGAGGTTATAATATCGAATCACTCGCTGTTGGATTGAA |
| | | | | CAAGGACAAAGCTCTCTTCACTATTGTAGTTTCCGGAACGGATAATG |
| | | | | TGTTGCAGCAAGTGATGGAACAGCTTCAAAAGCTTGTCAATGTTTT |
| | | | | GAAGGTTATTTTTCTTTTGAATAATTACCGTGGCATCCATGTCTTCAA |
| | | | | TTGTTTAGAATTCTCATCACTAAGCACAACTTGTACATTTAGGTTGA |
| | | | | AGATATATCCAAGGAGCCTCAAGTAGAACGTGAATTGATGCTTGTA |
| | | | | AAAGTTGGAGCTGATCGGAATAACCGTGCTGAGGTACCTAATAATA |
| | | | | TATGTCAAAATACCCAACTGTACAAAAGAGTTGATCTTATTAGATAC |
| | | | | AGGCAGATATATTACCTACAGCCTACATCTCTATGTTTTTTGTGGCA |
| | | | | ACTTTCTGCTACATGCCGATCTTTCTTAGTTTTCTCCTAGTGAATTGT |
| | | | | AATTTTTAATATATAATTTGTTATTCCACTATGTCTGTTCCTGATTTAC |
| | | | | TTTCGCTGATCACATCGTTCGTGTTTCTTCTATTGTAGCTGATGTGGT |
| | | | | TGGTGGACATCTTTCGTGCCAAAATTGTGGACATATCGGAAGAGTA |
| | | | | TCTTTCAATAGAGGTAATCACAGGATATTTCATAAAATCAATGTTCA |
| | | | | TTTTGGGAATATTGGGAATATTGTGACAAGTATCAATGTTTTATGTA |
| | | | | CAGGTTAAGTGTTTTATTTGCATTTTCCACAAGCTACTTCATCCTCTT |
| | | | | CTCCGAAGATGTGTAAAATTGTAATATACATATTCACACCAAATTTA |
| | | | | AAATTTTGGAAGAGCGACATACAAATGATTTATGACCTAATTTTGCT |
| | | | | GTATATATACATGCTTATATTTTCTTCAAACCGCTTTAGAAAATTTAT |
| | | | | TATATTTTTCCTCCTTCAAAGAAAACAAGTTTTGTGAGATAAAAGCT |
| | | | | ACATGTTTAGTAAACAAATTTAGTGAAGACTGATGAAAACAAAATT |
| | | | | TGTACTTTTGAATGGTTTTATATATTTTATGATCTTTGTAAGCTAATA |
| | | | | TGGAAACTATAAGATTGTAGTTGGTTTTCTTTAGCTCTTTTCGCTTTT |
| | | | | ACCTTTCATTTTTTTTACATGCTTAAAAAAGCGACTCACCTAGTACTT |
| | | | | TGATATCCAGGTCACTGGAGATCCAGGAAAGATGGTTGCTGTCCTT |
| | | | | AGAAACCTAAGCAAGTTTGGCATCAAAGAAATTGCTCGTACCGGAA |
| | | | | AGGTTTACTATTTTTTTTTGTAAATTTTTCATCGTTGTTAAAGAGATC |
| | | | | TTTTAGTTTCCACATTGCATAATAAATGTGAATGCCTTTTGTTTATTG |
| | | | | CTTGTCCAGGTTTTTTATATTTTTTTAAGATGTAAAGTTTAATATCTA |
| | | | | ACAGATTGCTCTAAGAAGGGAAAAATTGGGCGAGTCTGCTCCTTTC |
| | | | | TGGCGTTTTTCTGCTGCTTCTTATCCTGATCTTGAAGAAGCTATCCCT |
| | | | | ATGGATTCTCTTTCTGGAGTTGCAAAAGCAGCAACTGCTGCTGGATC |
| | | | | ATCGGATTCGTCTGTGGAGGTGTGTTTCTTATTTGTCCAAAATTAAG |
| | | | | TGTCCAAGTGTCGTGCCCAAGTCCGAATATCGAGGATCAGACATGG |
| | | | | GTACTTGAGTTAAAATGAAGAGTCCGGGTAACAAATGTAATTGATT |
| | | | | AAAAAACATATAGTTGCCGGATTTTAAATTTTTTTTTAAGGTAGTTG |
| | | | | GAAAAATTTCCTTTTATTAGAAAAACTTTGGGAGGACAATATTTTTG |
| | | | | TGAATGTGTCCGAGTGCCTCTTATGTTAAAGGGCCTCAAGACGAAT |
| | | | | AGGAAATGGCAGGCGGGTCGAATGCGGGTGTGCAGGATGGTTGCT |
| | | | | GGCAATGTTTCCGCAGGCTGTTGTTGGTGTGCTTTTCACTTCAGTAG |
| | | | | CAATTTACAGCAAATTAGTAGCAAATTTACATCAAATTTACAGCAGA |
| | | | | TTGTTAGCTCAATAACCCATCATGACATAAATATTAATGTATAACAT |
| | | | | AACTTTAACTACAAAATACAATTTAGAATCATCAAATCACAATTTAG |
| | | | | TTGTTTAATATACATTAAAATATTTCTTTGTAGGAACTTCAATTCTAT |
| | | | | CTCTTAGTAGCATAAATTTTACAATCAAACGCAACAAAAGTATTAAG |
| | | | | TTAGAAAGGGAGTACTGCATGTGGATTGTCTCAGCAAGTGCTGCAG |
| | | | | CAGCTTTGCACTATCTAGTGAGACATTGGAAATGATTAGGAGCTTT |
| | | | | GGGATAAATATGCGCAGAAACACTTCTCTTCTTGCCATCCCAAGGAT |
| | | | | ACTGCAGCTTCAGGAAAATGAAGGTCCTGTATGATTTTTAGAAACTC |
| | | | | CACCAAATTCTGAAGATTAAACTCACCTCCGTACCTAACATTGAGAT |
| | | | | ATCTTCAGTATATTCTCACCTACCTGATACCTTGCTATGAGATCTCTG |
| | | | | TAAATCAGCTTCACTAAGACAAGCCAAAATTTCTAACTAGAAGTCAT |
| | | | | TTTCTGCAAATTTTAATGCAGATTCCAGAACTACCCATTATCATTAAA |
| | | | | CTTGAATATTTCCCCTTTTTATAAC |
| 1708 | Amaranthus | gDNA | 4516 | AAGAAAAGTGTAGACACAATTAAAAAGTTCACTTTGAATAGGAACC |
| | palmeri | Contig | | AAGGAAATCTAGGTAAATTATAATTATTTAGGAGAATGGTAAATCA |
| | | | | TCACAATGTGGCCTAATTTTATAAAAGGATATTTGGTATTTTTTTTAA |
| | | | | TATTTTTCTTGTATTAATTATTTTATTAAAATGACTGATGATTTCTAAA |
| | | | | TCACCATTATTGATTAAGATTTATATAAATCACATTGTAAAAGCAAA |
| | | | | ACAAAAAGCACAAATTCAATAATATACTCTTTAAGTTTGTTTATCTTC |
| | | | | TAATTAGTTCGGTTAAAACGGTTCCCCACTTTCTTCTCCGACTCTCAC |
| | | | | AATTATCTTCCCCTATTCATTTTTCTTCCACCCTCTCTAATGGCGGCTG |
| | | | | TTTCCTTCAATATCAATGGTGGAAAGATTGGAACTTTATGTTCAAGA |
| | | | | CACGAATTCGTTTGTGGGTTTGTAAGAAAATTTCATTTTAGAACTCA |
| | | | | TACTTCTATATTTGAAAAACATATGCCAAAAACTTCAAGGTTTAAAG |
| | | | | CAATGGAAGTTTCTGCAAATGCAACAGTAAATATAGTTCCTGTTTCA |
| | | | | GCTCATTCTAGGTAATTTTATTTCTCGAAAATTTCCGATTTACAATTA |
| | | | | AATTAATCTTGTTTTGTAGGTAATGAATTGCAGAAGAAATAGATGG |
| | | | | ATTCTTATTTGTTTATTGGTATTTGTTTATAAATTTTTGTTTATATTAG |
| | | | | TTTCTGAATTGTGATTATTCTGATTGTATGTCAAGGTTTAGGTTGTTA |
| | | | | CTAAATGTAAATTGGATTGATTGAAGTTGCAATAAGGTGATGGCGT |
| | | | | GATGCTGATTGTTGTAAATTTTTGTTTATATTAGTATAGTACTACTTA |
| | | | | TTGACCTAAGTTCTTTTACATAGTAGGAGATATTATAACTTTTGCTTG |
| | | | | TGGACTCAGGGCCGGCCCTAAGGGTGGGCAAGAGGGGCCGTCTCC |
| | | | | CAATGCCCATGTCAAAAAAGCAAAATTAATGGTTATATAAGGTTTAT |
| | | | | ATAGGTTATAAATTGTAAAGGAAAAGGACGTCAATGTGTCATTTCT |
| | | | | CCCAGGGCCCCAAAATATCTAGGACCGGTCCTGAAAGAAACTACTC |
| | | | | AAAATTTGTAGGATTTTCTATTGAGACATTTTTTTTTTTGTGGATTAA |
| | | | | TGATTGAACTAAGATCAAATAGATACTATTTCTGTTTGATTGAAACT |
| | | | | TTTGGGTAGCCGGATGTGTACCGGCGTGTGACTTCTTTTTGAGTTG |
| | | | | GTTGATTCAATTGTATTGTTAGAAATGATCTTTTCTAGGGTCTTTGG |
| | | | | AGACATTGGTTCTTTACTTTTAGTCTATGAATTATGATAGTGTTGGTT |
| | | | | TAAACACCATTTTGTTACCCTATTGTGATTAAGTGACTCCCAGCTCG |
| | | | | ATTAAATTTAGGAGTTATATTAATGTTGTCTTTGTTAGTTATATTGAT |
| | | | | GGTCGGTAGTTCGGTTAAGTTTGTCTATGAATACATTGATTTTATCC |
| | | | | TTATTTGGCCAACAAATGTATGTAATTTAGGAAAGTTATATGATTTA |
| | | | | CCACTTTGTATTTGTATCTCTGTTATTTTCTTTCTTCTTTTCTTGATGTG |
| | | | | TTGGTTGGATAAAAGGAATTTGGAGGGAAAGAAAGGAAAGAGAA |
| | | | | ATAGAGGGATGAGACTTTGTCATATGTATATCAAATAGAGATGGGA |
| | | | | AATGGAGGGGAGGGAATAATAACAATGAATTCCTTCTGTTGTTTTT |
| | | | | GAAACCAATTTCTCCATTATTAGAAGGAACTCATATCCTTGTGTATG |
| | | | | ATCGGAGAAAGTAATGACTGAATCATTCATGAAGCTCATCCTTGGT |
| | | | | GAATTTATCTCTTGCTAATTTCTCCCATTTTAGAATGACCCCGGTCAC |
| | | | | TACATTTATGCTAAGTCTGATTGCTCGGGCCGTTGCCTACTAATCAT |
| | | | | TCCAAATCTCTTGAATAAAAGTCATTTTAAATTATCAAATGTATCTCA |
| | | | | TTCTATGCTGTTTTTTTTCTTGTATGTTGTTATCATTAGCATGGTAAC |
| | | | | AAAATGTATTTTCATTCTTTTCCAGGGTGATGCGCCACACAATTTCA |
| | | | | GTCTTTGTTGGGGATGAAAGTGGTATAATCAATAGGATTGCCGGCG |
| | | | | TTATTTCTAGGAGAGGATACAACATAGAGTCTCTAGCTGTTGGTTTA |
| | | | | AATAAGGATAAGGCTCTTTTTACTATAGTAGTGTGTGGGACTGACA |
| | | | | AGGTGTTGCGCCAAGTAATGGAGCAGCTCAGCAAGCTTGTTAATGT |
| | | | | CTTAAAGGTAGTCATCTCCTTTTTTCTTACTTTAAGGTAACTAGTGAT |
| | | | | ACTTTCATTTAGTAGTGGCGGTCAATGGTGATGCTAACCATGCATGT |
| | | | | TCATATTGTTTGTGCAATATTGCTCATTTTGGCTTTATCATTGTTGTT |
| | | | | AAACTTTGAGAGAATGTAATCTCAAGAGCATCTATCCTCACTTCAAG |
| | | | | ATAGATAGAGCAGGGAAACACTCATGATTCTTTTAATAAACTTTCAA |
| | | | | AATATTAAAATTCCCTTGCCCTAATGCAATTTTATAGCTCCCAGCTAA |
| | | | | TCCGAGTTCAAGGGGTTCGAGTGTATGCAACCATACTCATATAACA |
| | | | | ACAAAATGGTTGATTCAGATTGACCCTTAAAATCAAATACCATCTTG |
| | | | | CAAATTCACTTAAACACATACTTTAACGACCCGTTTTATAGTAGTCCA |
| | | | | TTAAAATTCGAAAGCAAAGAATTATAAAATCTTTTATTCCATCGAGA |
| | | | | ATAGACACAATAATCTTCAAAGCAATGTCTATAAAAAGTTTGTCGTG |
| | | | | TCACCGTATCGTAACTTAATTGTAAGGGCCTTCAATTTTACTGCCATC |
| | | | | AAAATATAGGTTGAGACCCACAAAACCATTTACATAGACAAGAGCC |
| | | | | ATTTCACTACCATTATCATGACCATGATTGAGACCGCATTTGTGCAC |
| | | | | AATGGTCAAGTGACATTGTTCAGCACTACTCAGAACTTGAATTGGA |
| | | | | GGAATTTGTCTAATGATCTACTTATGTAACAAATTCTTGATAATGTT |
| | | | | GTCACATATAGTGGGGAGAAGTTTGAAGGTCACATAGCTACCACAT |
| | | | | GTAACTGAATGCATCTATTGCAGTTAAACCTAATGGCAGGGAGCTG |
| | | | | TCAATGCAGTCTTTTGAAAGGAACTTGTAGAAGGTATCTTTTAAAGA |
| | | | | AAAAAAATTTGTCGTTAGTTTTTAAAAAAAGTTAAAAATTATTTTCTT |
| | | | | GAAAATTTTCTTTTTAAGTAAAATAAGTGTGGTAAAATGGACATTAT |
| | | | | GTTGGAACTTAGAATTTTTAGTAATAGCTTGTTAATTAGCATGGGAA |
| | | | | GTGATTAATGAAGTTTTATGTCCATTAGGTAATAATGTGTGAAGTAT |
| | | | | TCTTATATGTATTATTGCTTGCACTTTCCATTTGATGGTGCGCATCAG |
| | | | | GGTGTGCAATAGTACTTTATCTGATCTGACATATATGTTCTTACTTAT |
| | | | | GCTATATGCTCGCATTTAAGCATTCCTTACTAAAGGTGTTTAACGGG |
| | | | | ACGATTCGACTAATGGATCAACGGTCGGGTCGGGTCATATCTTTAA |
| | | | | CGGGTCATCAGCGGGTCAGGTTAATAAAGGGTCGAACCATTAACG |
| | | | | GGCCTTGATGTAAAGGGTCGGGCAGAGCCGGGTCAAATAATTATA |
| | | | | GGAATTGGTTGCAAAAAATTTTTTTTCCACTGTTTGTTTTTATATTTT |
| | | | | AGATGATATTATATACATAGTTAGGTCGATCCAACGGGCCATAAAG |
| | | | | TAGAATAAAAAAAACTATTACATGAACCTTTAAAAACGGGTCGAAG |
| | | | | TGGGCCTGGTTTAAACGGGCTTTGACCCGTCCTGCCCCGTTGAAATT |
| | | | | TGACATGACCCTCCCCGCCTCGCCCTATTTAAATTTAGCTCCATCCCG |
| | | | | GCCCATTGAACACATCTATTCCTAAAATAACTAACATTATGATGGCT |
| | | | | CATCCTATTCGCTACCATGCATGTAAATGTACACAGTGTCTATCCGTT |
| | | | | TATCCTTTTTTATATCCCTGTATACCATTTGTGACTAACGGTATTAAT |
| | | | | TTTTTATCTTCCTTGTAGGTTGAAGATCTATCTAGAGAGCCTCAAGT |
| | | | | GGAACGTGAACTTATGCTATTAAAGCTTCATTCTAATGCGGATACCC |
| | | | | ATGCTGAGGTAGTTCCACAAGTTCAAATAATTATATCCTGAATGCTA |
| | | | | TATAATTCATGAATCTTTTGTTTTCCTCTTAGAATCATCAGCTACAAG |
| | | | | AAGGTAGATAAAGATAAGCAAATATTCAAAAATATGCTATAACATC |
| | | | | ATGTGCTTTGTAAGCTTTAAACTTAGAGATAACAAAAATACTTAAGG |
| | | | | ATACATCATGGGTATGTAGCTGAAGATCATATGAGAAGTTACATTG |
| | | | | CTTCTTTGTGTGTATCGTAAACAATCTGGTATTGTATAAGTCCAAATT |
| | | | | CCATATTTTGATTTTCAGATAATGTGGTTAGTGGACATCTTCAGGGC |
| | | | | AAAAATTGTCGATATGTCGGAAAGCTTCGTCACTGTAGAGGTTAGT |
| | | | | ATGTTTGTGATTGACATCTTGTGTACCTATCTTCTGTTCAATGTAGAT |
| | | | | TCTTTTTCGTAGTGGTATTTTTTTTTCTGTCGTGCAGGTGACTGGCG |
| 1709 | Amaranthus | cDNA | 1767 | GTGTCTTTCTTTGCACCCTGGTTGTCCTCGTCAGGCCGAGTTAGCTG |
| | rudis | Contig | | TGTTTCAAATTTCCATCCATGGAGGCTGTGTCGACTCACCTTTCAAC |
| | | | | GAGTTTTAACTCCATTCCGAAAAGTAATAGATTGAACCATCAAACTG |
| | | | | CAAAACGATTAGGGTTCTCCTTGAAACCCCATTCGCTGGGTTTTAAG |
| | | | | TTAACTCCAATAGAGGTTGGAATTTGGAGTTTGATAAACTGGTTGTA |
| | | | | TCTGCAAGCAATGTTGATCAACTGGGAAATCAAAGTAACTTATCCTT |
| | | | | TAATCCCCTTTCTCCCTCTCGATCAAAGGAGAGACGACATACAATAT |
| | | | | CAGTATTTGTGGGGGATGAAAGTGGAATGATTAATCGAATAGCAG |
| | | | | GGGTCTTTGCCAGAAGAGGTTATAATATCGAATCACTCGCTGTTGG |
| | | | | ATTGAACAAGGACAAAGCTCTCTTCACTATTGTAGTTTCTGGAACGG |
| | | | | ATAATGTGTTGCAGCAAGTGATGGAACAGCTTCAAAAGCTTGTCAA |
| | | | | TGTTTTGAAGGTTGAAGATATATCCAAGGAGCCTCAAGTAGAACGT |
| | | | | GAATTGATGCTTGTAAAAGTTGGAGCTGATCGGAATAACCGTGCTG |
| | | | | AGCTGATGTGGTTGGTGGACATCTTTCGTGCCAAAATTGTGGACAT |
| | | | | ATCGGAAGAGTATCTTTCAATAGAGGTCACTGGAGATCCAGGAAAG |
| | | | | ATGGTTGCTGTCCTTAGAAACCTAAGCAAGTTTGGCATTAAAGAAA |
| | | | | TTGCTCGTACCGGAAAGATTGCTCTAAGAAGGGAAAAATTGGGTGA |
| | | | | GTCTGCTCCTTTCTGGCGTTTTTCTGCTGCTTCTTATCCTGATCTTGA |
| | | | | AGAAGCTATCCCTATGGATGCTCTTTCTGGAGTTTCCAAAAGAGCA |
| | | | | GCTGCTGCTGGATCATCGGATTCGTCTGTGGAGGGTGATGTTTATC |
| | | | | CCGTGGAGCCGTTTGATGGTTTCTCCCCTCCAATCTTAGATGCTCAT |
| | | | | TGGGGTATTTTGAATGAAGAAGATACTAGTGGGATGCGGTCACACA |
| | | | | CTCTATCTATTCTTGTCAATGACAAACCCGGGGTCCTTAATGTTGTTA |
| | | | | CGGGGGTTTTTGCTCGAAGGGGTTATAACATTCAGAGTTTAGCTGT |
| | | | | GGGTCATGCGGAAGGTGAGGGTCTATCTCGTATCACTACTGTTGTA |
| | | | | CCCGGTACAGATGAATCAATTAGCAAATTGGTTCAACAAATCTACA |
| | | | | AGCTGGTTGATATTCATGAGGTTAGAGATCTTACCCATTATCCATTT |
| | | | | GCTGAGCGAGAGTTGATGTTGATAAAAGTAGCTGTGAATACTGCTG |
| | | | | CACGTCGTGAGGTCCTAGACGTTGCCAGCATTTTTAGAGCAAAAGC |
| | | | | TGTTAGATGTATCTGATCACACCATAACACTTGAGCTCACTGGAGAT |
| | | | | TTGAACAAGATGGTTGCTCTACAGAGATTGCTCGAACCGTATGGAA |
| | | | | TCTGTGAGGTTGCACGAACAGGACGTGTGGCCTTGAGTCGAGAGTC |
| | | | | TGGTGTAGACTCGAGATATCTCCGTGGATACTCTTTCCCTGTGTAAC |
| | | | | AGTTCTGTCAAAACGTATGATGTAAAAAGCCTTGGTTATTTTTTTTGT |
| | | | | TTTACGAAATTGTCTCCAGATTTTGATCCTTTGAATTTGTGTTCTTGA |
| | | | | AGAATATTTGCAAGTTTGGACCACATCTGAAACTTTGTTTTAGTGAA |
| | | | | ATGAGAGACCATCTTCTACCTGGTGAAAAGCAGTTATACAAAAAAA |
| | | | | AAAGAAAAAAAAACAAAACATGTCGGCCGCCTCGGTCTCTACTGA |
| 1710 | Amaranthus | cDNA | 1560 | GGTATAATCAATAGGATTGCCGGCGTTATTTCTAGGAGAGGATACA |
| | rudis | Contig | | ACATAGAGTCTCTGGCTGTTGGTTTAAACAAGGATAAGGCTCTTTTT |
| | | | | ACTATAGTAGTGTGTGGAACTGACAAGGTGTTGCGCCAAGTCGTGG |
| | | | | AACAGCTTAACAAGCTTGTTAGTGTCTTGAAGGTTGAAGATCTATCA |
| | | | | GAGAGCCACAAGTGGAACGTGAACTGATGCTTTTAAAGCTTAATTC |
| | | | | TGATGCAAATTCCCACGCAGAGCTAATGTGGCTAGTGGACATCTTC |
| | | | | AGGGCAAAAATTGTGGATATCTCAGAAAGCTTGGTCACTGTTGAGG |
| | | | | TGACCGGAGATCCTGGAAAGTTGGCTGCTGTCCTAAGAAATTTTAG |
| | | | | AAAGTTTGGAATCAAAGAAATTGCAAGGACCGGTAAGATTGCTCTA |
| | | | | AGGCGAGAAAAGATGGGTCAGACAGCTCCTTTTTGGAGATTCTCTG |
| | | | | CTGCTTCTTATCCAGATCTACAAGAAAAGGCTGTTGATGCTCTTGCC |
| | | | | AGGCCTATGAAACGGAGCGTCAATGGTGATTCTGGCTCATCTTCAA |
| | | | | GTGGTGATGTTTATCCGGTGGAACCTTATGATGTTTCGATGGTAAAT |
| | | | | CAAGTACTTGATGCTCACTGGGGCGTACTTTATGACGGTGATTCAA |
| | | | | GTGGTCTCCGGTCACATACGCTGTCCATGCTGGTAAATAATGCTCCC |
| | | | | GGAGTTCTTAACACTGTTACAGGAGTAATTTCTCGTAGGGGTTATAA |
| | | | | CATTCAGAGTCTTGCTGTAGGCCCTGCTGAAAAGGAGGGTCTTTCTC |
| | | | | GTATCACAACTGTCATTCCTGGAAACGATGAGTCGATTGGAAAATT |
| | | | | GGTTCAGCAATTTAACAAGTTAGTAGACCTTCATGAGATTCAGGAC |
| | | | | CTTACGCACCAGCCATTTTCAGAGCGAGAGCTTATGTTGATCAAAAT |
| | | | | AGCTGCAAATACTACAGCCAGGAGAGATGTTCTTGATATTGCTAAT |
| | | | | ATTTTCCGTGCAAAAGCTGTGGATGTTTCGGATCACACGATAACATT |
| | | | | ACAGCTTACGGGTGATTTACACAAAATGGTTGCGCTACAAAGATTA |
| | | | | TTGGAGCCTTATGGCATTTGTGAGGTGGCACGGACAGGAAGAGTA |
| | | | | GCACTGAGTAGAGAGTCTGGGGTCGATTCTACATCTTTACGTGGAT |
| | | | | ACGCTCTTCCATTGTACGAATGAAAAATCTCCGGCTATGTCTTTCCG |
| | | | | TCAATATCATGTCCATTTCCTTCAGCACGTCTGCACTACATTTACATA |
| | | | | GCGATCAATCGCCCGTCAACCAGAGTGAAGGAAAGCAGTATTTCTG |
| | | | | ACCTTTGCTTTGAACATGCTATTTTGTATAATAGGAATAATTTTGTAT |
| | | | | TGGTTATATTTGCTAATACCCAGTAGTAATATTGTTACCTCGAGTTC |
| | | | | GAATATCTGAAACATACTTTTTCTCTTGAATGCGTAGAGAACATTAG |
| | | | | CACGGTCTCTTGGCCGGATAACACGCATTATTCAAGAAGGAATTAG |
| | | | | GATTGTAAACAGTTCCAAACACTAGTGTTTTCGCGTTGGGAAAACA |
| | | | | AAAGAAAAAAAACAAAACATGTCGGCC |
| 1711 | Amaranthus | cDNA | 341 | GGTATAATCAATAGGATTGCCGGCGTTATTTCTAGGAGAGGATACA |
| | rudis | Contig | | ACATAGAGTCTCTGGCTGTTGGTTTAAACAAGGATAAGGCTCTTTTT |
| | | | | ACTATAGTAGTGTGTGGAACTGACAAGGTGTTGCGCCAAGTCGTGG |
| | | | | AACAGCTTAACAAGCTTGTTAGTGTCTTGAAGGTTGAAGATCTATCA |
| | | | | GAGAGCCACAAGTGGAACGTGAACTGATGCTTTTAAAGCTTAATTC |
| | | | | TGATGCAGATACCCATGCTGAGATAATGTGGTTAGTGGACATCTTC |
| | | | | AGGGCAAAAATTGTCGATATGTCGGAAAGCTTCGTTACTAGAGGTG |
| | | | | ACTGGCGATCCTGGAAA |
| 1712 | Amaranthus | gDNA | 7847 | GTATCTGCAAGCAATGTTGATCAACTGGGAAATCAAAGTAACTTAT |
| | rudis | Contig | | CCTTTAATCCCCTTTCTCCCTCTCGATCAAAGTATGTTATTTTTCCCTT |
| | | | | TTTTGATTAATTTCACAATGTTAGAATCTGGGTTTGGCTTGTTGTTTT |
| | | | | AATTTCTACTAGTTAATTTTGTTTTTCATTATGTTATAAAATTTTTAAA |
| | | | | TGAAAATGAGTAATCATTTAATTTATGAACAATTGTTGTCACTCGTG |
| | | | | CTAGCCTGAAGGATTGGGAAAATTAGTCAATTATGAATCTGGTATA |
| | | | | TTTTTCATTGATTTGTGTGTTTTGTTGCATCTTGCATGTAGTTTGTTCA |
| | | | | TCCATTTGATTTTTATACAAGAGAGCGTGCAAAATTTAGCATGTTTT |
| | | | | CAGTTCTTAAATTGATCACTGCCTGTATTTTATTAGCGTACCCCATTA |
| | | | | AAACGACTCATTAAATCACTTTTTTTATTTGGGTGAAGATGTTTAAG |
| | | | | ATCTTTGCTACAAAGATTTGATCGGAAACAGTCTCTTTGTTATTATCA |
| | | | | CTAATAAGGGTAAGATTGTATACATTAGACTCCAAACCGCACCTAG |
| | | | | GTCTGGGGGCACTAAATAGCATTGGGGTAATGAAATGTTGTTGGTG |
| | | | | TATTTTTGTAATGAATACCAAACAAGCTGTTAAGTATAGATACTTTC |
| | | | | CCTGCAATAATACAAGAGTTTATGAGGCTCTTGTTCAAACCAGCACA |
| | | | | AGTTTATTGAAAGATTTATCAGTAGTTTTTTTGTGATTCATAATCTTT |
| | | | | TAAGTACCAAGCAAAGCTCTTTATGACATGGAAACCCGCTGCAATCT |
| | | | | AATTGACCTAGTGCTAAAAGCTGCTTGATTTGCTTATTGCCTTAAGT |
| | | | | GAAAATTTATAGCAAGCGTTTTGGAGGAAGAAAAGCAAAAGATCG |
| | | | | ATATGCTTTCATGTCTTCAGAAAATTAGTTCCGAAGTTGTGGAGTAT |
| | | | | AATAGAGTTCAATTATTGTTTGCATTTAGATCTACCTTGATTTGATAT |
| | | | | ACAACAACAATGTCATATCCTTATTCCTAAAAGATTAAATTCTACTAC |
| | | | | ATGAACCAATATGCTATCATTTTGAGTAATTGTCCTTCTCTATTCATT |
| | | | | TCGATTTTCTACCACTCAACTTATAAGTCTAAATCTTTCATATGCTTTT |
| | | | | CCACTCCTGGTCATCTTTGCTCTTCCTCACCTTCTTTTTAAGTCTTCCG |
| | | | | ATTTGCTACTTTCTATCCTTCTTATCGGTTCACTTATACCACATCTTTG |
| | | | | CATATGCCTAAACAATCTTTAACAATTCTCTAGCGTTGTTTTCTCAAA |
| | | | | ATTTGCGACTTTCAAGCCTTTTTTTACATATTTTTTTTCGAATTCTATC |
| | | | | ACTCAAGGTATACCGCTCATCCACCAAAGCATTCGCCTTTCTGGTAC |
| | | | | TTCTATCTTTCTACTATGATCCTTTCTAAAAGCCCGCGTTCAGATGTA |
| | | | | TATAGTAGCGTTGATCTAATGGTGTAAAACTTACCTTTTAGCTTTAG |
| | | | | GGTCACACCTCGATCACCTAATGTCCTAGTCGTTCTTCTTTTGCCACC |
| | | | | GACACTTTATTTATTGTGTCACATCTTGTTGGATATTACCATAACTCT |
| | | | | AGAATCATACCCAAGGTATTTGAAACATCTACTTGGAGTAATTTCTT |
| | | | | TCTCTTCCAACATTATAATGTCGATTTATGTGATTTGTGCTAAAGTGA |
| | | | | CACTTCATGTACCCTATCTTCCATCGACTTAATTTAAACTATCGTGAC |
| | | | | TTCAACTCTTGTCTTCATCGTTATAACTTAGCTTCTACCCATTCCGCG |
| | | | | ACTTCATTTTCATCTACCTTGATATACCTTGATATAGCTTATCATTAAT |
| | | | | ATTTTTCTCATAATAATTCAAAAGTTTGCATCTATCTAATTTTAGTGC |
| | | | | TACAAGTGTTGCTTGTAGTAATTCTGTCTTGTTAGATTGTGGTGTGT |
| | | | | GAACTATGTATTTTTCGTGAATTGTTGCATTTCTTGAATGACTTGTCT |
| | | | | CTAGAATGATGCTCCTTAAACTTACTTCTTTTGTTTCATGTATGTTTA |
| | | | | AGGGAGAGACGACATACAATATCAGTATTTGTGGGGGATGAAAGT |
| | | | | GGAATGATTAATCGAATAGCAGGGGTCTTTGCCAGAAGAGGTTATA |
| | | | | ACATCGAATCACTCGCTGTTGGATTGAACAAGGACAAAGCTCTCTTC |
| | | | | ACTATTGTAGTTTCTGGAACGGATAATGTGTTGCAGCAAGTGATGG |
| | | | | AACAGCTTCAAAAGCTTGTCAATGTTTTGAAGGTTATTTTCCTTTAG |
| | | | | AATAATTGCCGTGGCATCCATGTCTTCAATTGTTTAGAATTCTCATCA |
| | | | | CTAAGTACAACTTATACATATAGGTTGAAGATATATCCAAGGAGCCT |
| | | | | CAAGTAGAACGTGAATTGATGCTTGTAAAAGTTGGAGCTGATCGGA |
| | | | | ATAACCGTGCTGAGGTACCTAATAATATATGTCACAGTACCCAACTG |
| | | | | TACAAAATAGTTGATCTTATTAGATACAGACAGATATATTAGCTAGA |
| | | | | TCTCTATGTTTTTTGTGGTGACTATTGACTTTCTGCTACATGCTGATC |
| | | | | TTTCTTAGTTTTCTCCTAGTAAATTGTAATTTTTAATATATAATTTGTT |
| | | | | ATTCCACTATGTCTGTTCCTGATTTACTTTCACTGATCATATTGTTCGT |
| | | | | GTTTCTTCTATTGTAGCTGATGTGGTTGGTGGACATCTTTCGTGCCA |
| | | | | AAATTGTGGACATATCGGAAGATTATCTTTCAATAGAGGTAATCAC |
| | | | | AGGATATTTCATAAAATCAATGTTGGTTTTGGGAATATTGTGACTGC |
| | | | | AGTTTTACTTAGACAAGTATCAATGTTTCAGGATGTTCTACAGGTTA |
| | | | | AGTGTTTAATGTACATTTTCAACAAGCTACTTGATGCACTTCTCTGAT |
| | | | | GACGTGTAAAATTGTAATGTACATATTGCACACTGAATTGAAAATTT |
| | | | | TGGAAGAAGGGACATTAAAATGATTTATGACCTAATATTGCTGTAT |
| | | | | ATATACATGCTTATATTTCTTCAAGCAGCTTAAGAAAATTTATTATAT |
| | | | | TGTTTTTCCTCCTTTAGTGAAAAAAGTTCAGTGAGATAAAAGTTTCA |
| | | | | TCTTTCATGTTTAGTAAACAAGTTTAGTGAAGACTGAAGAGAACAA |
| | | | | AATTTGTACTTTTTAATGGTTTTATATTTTTTGTTAATTTTGTAAGCTA |
| | | | | ATATGGAAACTATAAGACTGTAGTTGTTTTTGTTTAGCTCTTTTCACT |
| | | | | TTTACGTTTGAGTTGTTTTTCAATGATCACATGCTTAATAAAGTAATT |
| | | | | TACCTAGCACCTTGAATATCCAGGTCACTGGAGATCCAGGAAAGAT |
| | | | | GGTTGCTGTCCTTAGAAACCTAAGCAAGTTTGGCATTAAAGAAATT |
| | | | | GCTCGTACCGGAAAGGTTTATTTTTATTTTTTTTGAGAATTTTTTTTA |
| | | | | TCTTTGTTTAAGAGCTCTTTAAGTTTCCATATTACATAATAAATCTGA |
| | | | | ATGTCTTAGATATAAAACTTTTGTTTATTGTTTGTCCAGGGTTTATAT |
| | | | | ATTTTTAATATGAAGTAAAGTTTAATTTCTAACAGATTGCTCTAAGA |
| | | | | AGGGAAAAATTGGGTGAGTCTGCTCCTTTCTGGCGTTTTTCTGCTGC |
| | | | | TTCTTATCCTGATCTTGAAGAAGCTATCCCTATGGATGCTCTTTCTGG |
| | | | | AGTTTCCAAAAGAGCAGCTGCTGCTGGATCATCAGATTCGTCTGTG |
| | | | | GAGGTGTGTTTCTTATTTGTTCATTGCTCACATTCCTAATATTTTGAG |
| | | | | AGTTGAATCCACACATTTCTTTCTTGTTGTACAATTCTTTTTGTTTCTT |
| | | | | GTTTCCATCTGCCCATTTACATGATTGCATCTTTAATTATATTATTATT |
| | | | | GCTTTCACTAAATGGAACACCTTGATGTTGTGCTTTCCAAAACGAAC |
| | | | | GTTTTTATTCAAATCCATTCCTCAATACCAGTAATAAACCGGATTAAA |
| | | | | AGTGAACCACTATTATGGGAGGTTTTAGGGTATATTATGGATTCCG |
| | | | | ATTAAAACATAGTTAAATCCTAAAAGGTAGTAATTGGCTATGTTATC |
| | | | | TGGACTCGGGAACTCATGTGATATGTGTCGGAGTGTCTGATTCGGC |
| | | | | TAAGTTAAGGAAAAATACAATAACTTTTGTCCAAAATAAAGTGTCCA |
| | | | | AGTGTCGTGCCCAAGTCCGAATGTTGAGGATCCGACATGGGTACTT |
| | | | | GAGTTAAAAATTAAAATGAAGAGTTCGGGTAACAAATGTAATTGAT |
| | | | | TAAAAAACCTATAGTTGCCAAATTTTTAAACTTTTTAAGGTAGTTGG |
| | | | | GAAAATTTCCTTTTATTGAAAAAACTTTGGGAGGACAATATTTTGTG |
| | | | | AATGTGTCTCGAGACATGGCTCTTATGTTAAAGGGCTTCAAGACTA |
| | | | | ATAGGTAATGGTGGATATGTCGAATGCGGGTGTGCAGGCAGGTTG |
| | | | | CAGGTCAAATATTTCCACAGCCTGTCGTTGGTGTGCTTTTCACTTCTA |
| | | | | GCAATTTACAGCAAATTAGTAGCAAATTTACAACAAATTTACAGCTG |
| | | | | ATTGTAAGCTCAATAACCCATCATGACATAAATACTAAAATATAACA |
| | | | | TATGTTTAACTACAAAATACAATTCAGAATCATCAAATTACAATTTA |
| | | | | GCTGTTTCATATACATACACTAAATATTTCTGTGACCCAACTTCAATT |
| | | | | CAATCTCTTAGTATCATAAATTTAACAATCAAACACAACAAAAGTAT |
| | | | | AAAGTTAGAATGGGAGTACTGCATGTGGATTGTCTCTCAGCTAAAG |
| | | | | TCCTGCAGCAGCTTTGCACATTATCTGGTGAGACATTGGATATGAGT |
| | | | | GAGAGCTTTGGGATAAATATGCACAGAAATACTTCTCTTCTTGCCAT |
| | | | | GCCCAGGCTCATACTGCAGCTTCAGGAAAATGAAGGTCCTGTATGA |
| | | | | TTTTTAGAAACTCCACCAAATTCTGAAGATTAAACTCACCTCGCTAA |
| | | | | GCAACATTGAGATATCTTCAGTATATTCGCACCTATCTGATACCTCA |
| | | | | CTATGAGATCTCTATAAATTCAGCTTCACTAAGACAAGCCCAAAATG |
| | | | | AAATTTCTAACTAATAGCCATTTTCAGCAACTTTTTATGCAGATTCCA |
| | | | | AACTATCCATTATCCATAAACTTAAATATATCCCATTTTTATGACATT |
| | | | | TTTGATGCCTCTTGTATGCTAATTTTTTCTAACTATATACACTACCAC |
| | | | | AAAACACAAATCTATGCTTACTCTAAATAAGTTTAATATGAACTACA |
| | | | | TTTTATTTTTAGTGACTACGGCTTAGAAGTATATCTTAGAACAACTTA |
| | | | | CATTGTAGATTAATATGACATAATCTTTTATCAATCTATACCTCCTCA |
| | | | | GGACAAGTAAGATAAAAGAACTCTAATGTACAAAATTTAATTGATT |
| | | | | TTTTTGAAAAAAGATACAAGAAAATGGAAGAGGCAACACAGGCAA |
| | | | | AGAAGGCTTCTCGATCCTCTGAGCACTCTAAACCTTGCAATACTACA |
| | | | | GTGAACTATAAAAAAAGACAAGAAAGTTCAGAAATCATCAAAATAT |
| | | | | TTTCCCCTAAAAAGGTTCAACATCATCTTCTTCCTCTTCTTCCACAATC |
| | | | | TCGAATGTCATGTTCATCTAAAAGCCTATCCCTGTCCTCAATGGTGTT |
| | | | | GTACATAGCAGGCCTTGGAGGCACACTAATGCTTGCACTGCTTTTG |
| | | | | ACTTCAAGGAACTTTGAGTAGCAAAAATTGTCTTTTCACCTTGGCCA |
| | | | | AAGGGAGATTTGCAAGTCACAGTACTCACTGGAATGTATATAAAAT |
| | | | | AACTTTAATGATAAAAGACAATGAAAATGATTTTTGTGCATTTAAAA |
| | | | | AGATGTTTTTAAGTGACTATTTTTTTTCTAGGGTTTATCTTTTCTATTC |
| | | | | CTTCTCTCTCTTTTAATATGTAAATGGAATTTACGTTATAGGTTGAAG |
| | | | | GTCTTATTAATCAGGATGACATCTTGAGCAAATTGGTTCACATTCTA |
| | | | | GTCTAGATGCTTCGAGGCCATGGAATGGAGCCATGTCCCACAGTTT |
| | | | | CTATGTCTTTAATCCTAGGGGTCACGTGCCAATCTTTTCACCTAGATT |
| | | | | ATACGCAACTAAAATTTCCTAAGAGTAAGAGAAACTTTAGCTTCTTA |
| | | | | GTAAATCAAAGTTATCTAAATTTGTTAGATTAAGAGCTAATATTTCTT |
| | | | | TTAGCTGTTTAACACGTTAACCTCAGTTCTTTTAGGTTTGAGAGCAA |
| | | | | CCTTTTGCACCTAGGAGTCCATGTCCTTCATTTTTCTGTCCATCAGGT |
| | | | | TTTTATTTTCAAGCTCTTTTGTAAAATCTGAATGAGCCCCTAGCCGCA |
| | | | | TTCATATCACCTTACTTATGGCATCCTTTAGCCTAAAATGTTTGAAGC |
| | | | | AATAGGGAATCCTCTACTTTGGATAGTACAATGTTGCACAATCTCTG |
| | | | | CTTGCTTTTATGTGTATGCAATTCTTAAGATTAGACCGTCTTTTTAAA |
| | | | | GAAGAAGAAACATTTACTAGCGAAGATATAAAAAATACAGAGGGT |
| | | | | CACTGAATCTTTATTAGTGGGCTTTTAGACAACAAACTAAGTGGACA |
| | | | | CATTAGGTTAAATGACATTCTTTATGCTTAGCAGATCTTAGACAATT |
| | | | | CCTATTCCTAACCAAATAACTATGTCTTGAGATAAGAGTCTATCCTTA |
| | | | | ATAACTACCAGATTGCTGTGGTGGTACAAAGTATCGTGTATTAACCT |
| | | | | GAAACATAATTGGCCACCAGATCACAAATGAAGCTCTTGTGAAAGA |
| | | | | AAAGGTAGATCCCATTTTACTCGGACCCTTTTCTTCCTATTGCAGCTT |
| | | | | GGATCTTTCTGATTGGAAACTCTCTTTGCTGCTATATGATGTTCTTTA |
| | | | | AGTTCTATGGGTATCTTAGCTCTACAACTTTATTTCCTAATTCAACAA |
| | | | | TTACCATTTCCCACCTGCTCCAAATATTATTACTTGAAGAATTTTGGC |
| | | | | TGCTTGTATAAGTATGTTTGGTCCTTGAACTACATTATGTCTCCCCCC |
| | | | | TTCCCGAGCATTTTCTGTTAAGGGTTTTACTTTTCTGATGAATTATCA |
| | | | | TGTCTGCTTCGGAGTTGAACTCACATCAATATCTTGAAGGGTTTTAT |
| | | | | CCTCTATTTTTTAGGGTGATGTTTATCCCGTGGAGCCGTTTGATGGT |
| | | | | TTCTCCCCTCCAATCTTAGATGCTCATTGGGGTATTTTGAATGAAGA |
| | | | | AGATGTAAGCTACTTTCCTTTCTCTTTTATTTCTCTCGGGTTGTTTATT |
| | | | | TTCTAGTTCAATTGTTTGCCTTTTGTGTTCATTTTCGATGGATACATA |
| | | | | GTTTTATCATTCTCCAGTTTCAAATTTTAATGGATGCAACAAAATGAC |
| | | | | TCTTTAAATTATGTGCACAGTTTCGATGGATACACAATTTTGTTTTCT |
| | | | | CTAAGTCTAGGGTTGTGCATTTATGCAAAGTTTCTATTTGATGTTTG |
| | | | | CTATTAAGGGTCAATTAGAAACAGTTTCTTTGTTTCTATAAGGATAA |
| | | | | GGTTGCATATGTGTGGCTCTCCAAACCCCACGTAGATGGGAGATTA |
| | | | | GGTGGGAGCCAATTTATAGCGTTGGGGCAATTGAAAGTTGTTGTCT |
| | | | | ATTGTTTGCTCTCCAAGGATTTTAATTGCTCAAGTTTGTGAATGATG |
| | | | | CATTTCATAGTTCTCATTAAGAATTTGACTTCAGAGTAGAAAACTCC |
| | | | | CTCCCATAAGGTTCTGCTATGGTTTGAGTTAGCTGTGCATTTATTTTA |
| | | | | ATTTGTAGGGAAGTTGATGTATCCTTCATACTTTTTGTTCATTGGTAT |
| | | | | CATGTATATAATTGAGAGCACCGAGTTAAATTTAGCCGACACATTCC |
| | | | | ATTTTTTGGGGACTTTTGGAAAAGAGAGGCGGATGGACTGCTTTCG |
| | | | | AGTAGAGTATAAGAAAGAGACTCTTTCTTTGAACTGATTTCTATCAA |
| | | | | GATCTTTATAAATTTTTCCTATTATCGCCCCTATGCCCTCTTTATATTT |
| | | | | TACGAAGTACTTAACTTTTATATCGATGGTTAGATTGTGGT |
| 1713 | Amaranthus | gDNA | 4818 | AGCAGTTTATATGTTTGTTGAACTGTATACTGTATAATGGCTGATTC |
| | rudis | Contig | | AAATGTGGAAGTTGATATGATCCTTTTAAGTTTTAAGGTGTAGGGA |
| | | | | GAAGTTGTTTCTTCAATTCAGTAATGATAGAGTATATAATATATGAT |
| | | | | CCTTGGTTTTCGACCATATCACATGTTCGAATCTAGCCTCATATATAA |
| | | | | CATATCTTGAGGCTTCCACCATCAGCTTAAACTTCGGTTGAGTTGGT |
| | | | | TCCCTGTGAACTTCTCGCCTTCGCTTCACCTTTATGCTTGGTTTCAGC |
| | | | | CTTGCAAAGTTGCTAGTCGTGGAGAGGGTTACTTCAGGAAGGCTGT |
| | | | | CAGCATATATCACTGGCACTGCATATCTTTTTGAATACAAAATCATTT |
| | | | | TTAAGGAAATGACTCTTCCATTTATGTGTACTTATTTATGTAAAGTTG |
| | | | | CAAATGATGTTTGCTACCAAGAGTCAACCGGAAAAAACTTCTTTGTT |
| | | | | ATCAATAACAAGGGTAATATTGCGTACATTCCCCCTAAATCCCAAAC |
| | | | | CCCAGCCTAGTTGGAAGCCACTGAATTGCAATAGTGTAATGGAAAT |
| | | | | GTTGTTCTATATATATTTGGTTATCTTAATGTATCTTGTTATCTACACC |
| | | | | TGCTTCTCAGGTAATAAAACAGATTCAAAATCTGATATTTCATGTAT |
| | | | | TTCATTTTGTGTATACAGAGTGATGCGTCACACAATTTCTGTCTTTGT |
| | | | | TGGCGATGAAAGTGGGATAATCAATAGGATTGCCGGCGTTATTTCT |
| | | | | AGAAGAGGATACAATATCGAGTCTCTGGCTGTTGGTTTAAACAAGG |
| | | | | ATAAGGCTCTTTTTACTATAGTAGTGTGTGGGACTGACAAGGTGTTA |
| | | | | CGTCAAGTCGTGGAACAGCTTAACAAGCTTGTTAGTGTCTTGAAGG |
| | | | | TAGTTAATTTCATTTGTTCATCCTTTTATTGGTAAATGGTGATAGTCA |
| | | | | TACTATGACATAGTGCTTGGTTCAGTACTGTACGGATTGCGTTCGAT |
| | | | | AAAATTACTTTACAAGTCTTATAAACCCATTTTCCAAACTAGCTTATA |
| | | | | CAAACAAAACATATCGTGAATTTTTTTTTACTTAAATAGAAATGTTAT |
| | | | | TGTTTAATATGGAGCCTTACGTATCAAGCAATATAATGGATCATCTT |
| | | | | ATATGCATATGTTTGTACAATGTACATGTTTTGTTGGATTGTCTAATT |
| | | | | GTCCTATATAACATCCTTAGACGATTACTGCATTGCTTGTAGGTTGA |
| | | | | AGATCTATCGAGAGAGCCGCAAGTGGAACGTGAACTGATGCTTTTA |
| | | | | AAGCTTAATTCTGATGCAAATTCCCACGCAGAGGTAGATTCACAAAT |
| | | | | TCAATCAATAATCTATGAAGGCTATATTTTCCATGTTTTAAGTTCTAA |
| | | | | TTTCCTCGTCTAGTTGTCAGTTAGAGTCTAGCAAGGAACAAAAGATA |
| | | | | GAGATGTTTTGCTTTAGCTTTTATCCATGATCAAAAAATATGCTATAC |
| | | | | TTCATATAAGGCCATGACTGTTACAACAACAACAACAACAATGCCA |
| | | | | GAGCCTTAGTCCCAAAAGTTCATAGATGTTAGATAACTCAAATTTAT |
| | | | | CTAGAAGTACATCGTGTTGTGTGAAGCTCTTATAAGAAGTTGCAGT |
| | | | | AGTGTTTTTGTGAGAAATCTAATACCAATTAACGTAAATCTTCAATTT |
| | | | | TTGATCTTCAGCTAATGTGGCTAGTGGACATCTTCAGGGCAAAAATT |
| | | | | GTGGATATCTCAGAAAGCTTGGTCACTGTTGAGGTTAGTGGTGTCT |
| | | | | TTGTTTGATTTCTCGCGTACGTCTTCTAAGCGTACCTTCCAGAAGTTG |
| | | | | ACCTGAGATCTGACCAGTCGATGTAAAATTTTTTTCTTAGTGGCATT |
| | | | | TTCTTTGGTGTTGCAGGTGACTGGAGATCCTGGAAAGTTGGCTGCT |
| | | | | GTTCTAAGAAATTTTAGCAAGTTTGGAATCAAAGAAATTGCAAGGA |
| | | | | CCGGAAAGGTTAGTCTTTTAGACATTTGCTGTAAGTTCAGTATAGAA |
| | | | | TTCGGAAAGGCGCAAAGAGTACATGTCAACTATTGTGGCTAGCCAG |
| | | | | GCAACTATTGTGCATTTCTGGTGAGATCAATGTGAAACAAGTTTAGT |
| | | | | TAACTACTTGTTTTGTTTTATATACTTAATATGATAGATTGCTCTAAG |
| | | | | GCGAGAAAAGATGGGTCAGACAGCTCCTTTTTGGAGATTCTCTGCT |
| | | | | GCTTCTTATCCAGATCTACAAGAAAAGGCTGTTGATGCTCTTGCCAG |
| | | | | GCCTATGAAACGGAGCGTCAATGGTGATTCTGGCTCATCTTCAAGT |
| | | | | GTAAGTGAAATTTTATCTTCTCGACAATTATCTTTTTCCTTTTCTCACC |
| | | | | TTGCATTGCCTATGTATACTTTTTACCTTGTATTGCCTATAGACTTAA |
| | | | | ACATGCTTTTATTTTTTGAAGGGTGATGTTTATCCGGTGGAACCTTA |
| | | | | TGATGTTTCGATGGTAAATCAAGTACTTGATGCTCACTGGGGCGTA |
| | | | | CTTTATGACGGTGATGTAAGTGCTCTATCACTACCTGAATTGTCTGT |
| | | | | CACTAGGTCGTCCAATGGTCCATGTGATGTCATGTTCAAATCTCTTA |
| | | | | GGCCAATGTTTCCTAATTTAGTTCCAAATCAATTGTCTGAATTCACG |
| | | | | ATTCACCCAAAATGGCCTAAATTTTTCGTTTTAATTTACAAATGACCG |
| | | | | AGTCATGACAAACATGTATTAAGGTCTGCTCTATGTTACTTGGACTC |
| | | | | GGGTACTGAGTCGGATACTGGTACGTGTCCAAGTGTCATATGCGTC |
| | | | | TCAATATTCAATTTTACGCCTAAAAGGAAGTGTCTAAGTGTCATACC |
| | | | | AATGTCCGAGCATCAATGATCGGTCACTGGTACGTGAAGCAAAATG |
| | | | | AAGAGTCTGAGTAATAGCGGTTCAATCTCATTTGGATTTTGGAGGG |
| | | | | TTAAGGTTTATGTTTTTGGGTTTTCAGATGTTCGTCTTTCTGTTATTC |
| | | | | ATGTTTAATTTTAAGAATGAAAGTTAGTTCAACTTTTCAATTTTTTGA |
| | | | | GCTGCACAGTACTATAAATTGGTTTTAGTCTGCTCTGCTAGTATCCT |
| | | | | GATTTGCTTCGTTCTTCATGCCAGTCAAGTGGTCTCCGGTCACATAC |
| | | | | GCTGTCCATGCTGGTAAATAATGCTCCCGGAGTTCTTAACACTGTTA |
| | | | | CAGGAGTAATTTCTCGTAGGGGTTATAACATTCAGGTCAGTGTGGA |
| | | | | CTCTGACTGCAGCAAGAAAGTATATAAAGCCGTTTGTGTTATGTAAT |
| | | | | GACAATCGTCCCCTTTTCATCCTCTTCAGAGTCTTGCCGTAGGCCCT |
| | | | | GCTGAAAAGGAGGGTCTTTCTCGTATCACAACTGTCATTCCTGGAA |
| | | | | ACGATGAGTCGATTGGAAAATTGGTTCAGCAATTTAACAAGTTAGT |
| | | | | AGACCTTCATGAGGTGAGCAACTATTTATACTTCTGATGTTTTTTTTT |
| | | | | TTTGAATAATTTGCAATTTACAAGTTACAACCATAAAGTTAAAACTT |
| | | | | CATGTTAAGCATGCACACCCGCGTAATATTTTTTTTTGGGCAAATTTC |
| | | | | AGCATAAAAGTTTTTTCGAAATGATGTTTAAGCTTGTTGTACTTCAA |
| | | | | TGACTCGATGAAGAGAATTTGCGTTTAAAGAGAGAGGGAGAATGT |
| | | | | TGGATACAAAGTGAGAGAATAGGTAGTTCTTTTGAATTGGAGGAG |
| | | | | AGTAGTGATTGATTTAGTCAAACACAATTAGTGACGGTCAACAACT |
| | | | | GCTCGGTGAGTTAAAAAAATTTAGTTGTTAATCGGGCTGAAATCGG |
| | | | | TGAGCTGGTAGCAATCAAATGCCCGAGCTCTCTTTCATGGGTCGTA |
| | | | | AGTGGTATAGGCCATGTCCCTTGTTTAGTGGGTCAAAGATTTATAGT |
| | | | | TCTTTGGTTTCAAATTATGATAAACTATATTAAGATGACCGACTAAA |
| | | | | ATCATGTGCACTTCTTATTTACCTGAAGTTGCTGATGATCTTTGCTTA |
| | | | | CTAAGGGTCAATCAAAAACAACATTTTTGTTATCAACTAAAAGGGG |
| | | | | AAGTTGTGTACATCTGACCCTTCAAACCCCGCTTAGATGAGAGCCAC |
| | | | | TTAATGTCAATAATGGCAATAGGATGTAATAAGTGGTATAGACTAC |
| | | | | ATAGTAATAACTTTATGGTTTTAAGATGCAAAGTATCCTTATCACTCC |
| | | | | AATATGTGCTAAGAGGCTCAAAACAGAAGTGGACGAGAAAATTAT |
| | | | | GACATTAAAAGTATACACAATTTTAGATCCGCGTTTATGACAAACTA |
| | | | | CTTGATTGATTCTTGTATTTCTGAAAGCCCAGTTCAATCTCCTTTGTA |
| | | | | ATATGTTGATGCTCGTTAAGTTACCTATTTTCTTTGTAATGCGTAAGC |
| | | | | CATGAAGTTTGAGGTGTTATCTTAGTCCAACAACACATCATGCTGTT |
| | | | | TATTTATAAGTATTATGAAGTACTATGAATGAAAGCAGGGTGAACT |
| | | | | CAGGCCCGGGGCTGCCTAGGCCATGGCCCGAGTCATTTGATTAAAA |
| | | | | ACGCTTACAACACAGAAAAATAGTAGTCGGGTTGGTTCAACATTCA |
| | | | | TGCAATAATTCCAAGATATGATAATCTAACTTCAGAATGGTTGCTGC |
| | | | | TGCAGATTCAGGACCTTACGCACCAGCCATTTTCAGAGCGAGAGCT |
| | | | | TATGTTGATCAAAATAGCTGCAAATACTACAGCCAGGAGAGATGTT |
| | | | | CTTGATATTGCTAATATTTTCCGTGCAAAAGCTGTGGATGTTTCGGA |
| | | | | TCACACGATAACATTACAGGTACTAAGCCGTAGGCACACAATTTTTG |
| | | | | CCATGTTCCTTGTTTTTTCCTAATATTTCCGACTTGGTCTTTTCCAGCT |
| | | | | CGCCAATATGTTGGGATTAAGGCTTTGGCATTATTGTGTTATTTTTG |
| | | | | CGTTTTTTCCAACTTCCTTATATTGGGATTAA |
| 1714 | Amaranthus | gDNA | 1687 | TTTTTTGAGCTGCACAGTACTATAAATTGGTTTTAGTCTGCTCTGCTA |
| | rudis | Contig | | GTATCCTGATTTGCTTCGTTCTTCATGCCAGTCAAGTGGTCTCCGGT |
| | | | | CACATACGCTGTCCATGCTGGTAAATAATGCTCCTGGAGTTCTGAAC |
| | | | | ACCGTTACAGGAGTAATTGCTCGTAGAGGTTATAACATTCAGGTCA |
| | | | | GTATGGACTCTGACTGCACCATGAAAGTATATCCCGTCTTTTGCATT |
| | | | | ATGTTAACTTGATTGTCCGTTTTCCCTTCTTCCCAGAGTCTTGCTGTG |
| | | | | GGCCCTGCTGAAAAGGAGGGTCTTTCTCGTATCACAACTGTCATTCC |
| | | | | TGGAAACGATGAGTCGATTGGAAAATTGGTTCAGCAATTTAACAAG |
| | | | | TTAGTAGACCTTCATGAGGTGAGCATCTATTTGTGTACATCGTAGGC |
| | | | | ATAATTGTCCAAATTAGTTAGTGTCATGTTTACTTATGTCGTTAATAT |
| | | | | TTAATACTATTTTGATATTTGTTTTTTCGACTATTATGATTGAAAGAT |
| | | | | TAGAATATCTTATTCCGGAAAGTTTGTTGTCGCAGATTCAGGACCTT |
| | | | | ACTCACCAGCCATTTGCAGAGCGAGAGCTTATGTTAATTAAAGTAG |
| | | | | CGGCAAATACTTCTGCCAGGAGAGACGTCCTTGATATTGCTAATATT |
| | | | | TTCCGTGCAAAACCTGTGGATGTTTCTGATCATACAATAACATTACA |
| | | | | GGTACTAAGCCGTAGGCACACAATTTTTGCCATGTTCCTTGTTTTTTC |
| | | | | CTAATATTTCCGACTTGGTCTTTTCCAGCTCGCCAATATGTTGGGATT |
| | | | | AAGGCTTTGGCATTATTGTGTTATTTTTGCGTTTTTTCCAACTTCCTT |
| | | | | ATATTGGGATTAAGGCTTTGGCGTTGTTGCATTGTTGACTGTTGTTG |
| | | | | TGTCTTTTCCAGCTTACGGGTGATTTACACAAAATGGTTGCGCTACA |
| | | | | AAGATTATTGGAGCCTTATGGCATTTGTGAGGTATGCGCCTATGTAT |
| | | | | TATTGTTTTTTCTATATAATCAGATTTTATTTATTTATTTTTGGTTCGA |
| | | | | AATCTGTTGATTGTTAGTTATTTTGCTTTTGAATATAAATGGATTATC |
| | | | | CTGTCTGTAGATTAAGAACAATCCTGCTAAATAAGAAAATACACACA |
| | | | | TAGACCATAGTGCAAAAACACAGTAAAGGTCGCCATCGCGGTTATA |
| | | | | GATATTGTGATGCGGTAATGGGGATGATGTTGTGTGGTTGTTATCA |
| | | | | TAATAATTCATAACGCCATATGTCGGCTGAAAACATGAGAAGCGAT |
| | | | | ATTCCTTGAAACAACCCAAACACGGTTTTCTTTACCTATAAGCGAAT |
| | | | | ATCGGTTCGATTTTTTGAAAAATTTTACAATGCTGCCCTGTTTTTGCA |
| | | | | CAATGGAGACACGAGCACGCCCACACACACATATATAGGGAAAGG |
| | | | | ATCATGTGAAAACAAAAAAGTGGACCATGAAAATGGATGAGTGAG |
| | | | | CAATAAACGTGAAGATATCGTGAAGTTATCCTTCAATACTATAAAAT |
| | | | | GGTTTTCACTAGATCATATATACTTCACATCTTATAATTGTTTTATAC |
| | | | | CCTTATGTACCTCATGTGCATATTATATGTGAAGTTCCAGATAATATT |
| | | | | TGCTATACCAAGGGTCAATCGGAAACAACCATTGTTAGTTTATCAAT |
| | | | | AAAAAGGATAAAATTGTGTACATCAGACCCTCTAANACC |
| 1715 | Amaranthus | gDNA | 1648 | TTTGGTTTATTGTATTTTAGTTGGGCCTTTATGTTTGTTAGTGGGCTC |
| | rudis | Contig | | TTGGGTTCTATATATAGGGATAGTCTATCATTGTAAGTCTTGTCTTG |
| | | | | TATTTTGGAATAAGAAATTCAAAAATAAGGAGGCTACACAACACTC |
| | | | | GAAGTTGTGTGGGTTTGTGGGAGTTTACACGGCACTCAAAGGTGTG |
| | | | | TAGTATATCTTGTGTACTGTTTTCTTTGTGTTCTTTGAATTGCTCTTG |
| | | | | GTGGAAGGCAGGAAGTATTACGTAATACTAATAATACTACTAATAA |
| | | | | TAATATTAATAGTAATATGCCTAAGTTTCTGATATATACAACAAAGT |
| | | | | ACCAAAATTGGATCTCAAACCCTTTCTATACACTAACTAATGTAAGA |
| | | | | GTGATAATCCCTAGTGCTGATTCGCCTTTTGAATTCGCGATTCATTC |
| | | | | AATTTTGCTTTTTTTGATTTGTGGTGGACAAGAAGATTAGTGAATCA |
| | | | | CGTGACACTGATTTCCCTTTCCTTCATCTTACTCATACCATTTTATCCT |
| | | | | CTTTCCTTCATCTTACTCATACCATTTTATCCTCTTTCCTTCGTCTCTCC |
| | | | | TTTGGAATTCACCTCTACTTATCTCTATTTCTATAGTTTTACTTTTTCC |
| | | | | CCTTAAGTATTTACTCCTACAAGCATTCCCTTATACATAAAGAACACT |
| | | | | ATTTACGACAACAATGCTTGATGAATAGTATTTGGTGCAGTAAATGT |
| | | | | AGCTGCCATTATAAAACACGGAGGAAATAGAATGGAAAGTTAGGG |
| | | | | ATAAAATGAAACTTACTATAAATTATAATACGATTAAAAAGGAAACT |
| | | | | GAGACTTTCTATTTGGATCACTTGCATATATGAGTAGATTAATTATT |
| | | | | GATGGTCTCACTCTGGAAATGTATTCTGATCTATTTTGAATGAGTCA |
| | | | | TTGAATGAGATTTTTATTCCGGATCCAGGTTAGAGATCTTACCCATT |
| | | | | ATCCATTTGCTGAGCGAGAGTTGATGTTGATAAAAGTAGCTGTGAA |
| | | | | TACTGCTGCACGTCGTGAGGTCCTAGACGTTGCCAGCATTTTTAGAG |
| | | | | CAAAAGCTGTAGATGTATCTGATCACACCATAACACTTGAGGTAAG |
| | | | | TTTTGGGGAGTTTTATTAATTTTTATTTATAAATGGTGTCCCGTTTTC |
| | | | | TTTCAATTCGAAAAGGTCAATGTTTATAAAAAGACAACCAACAGAAT |
| | | | | AGATGTAGCTCTGTTAAGTATTTGTATGACATTGTGCTCTTAAGATA |
| | | | | TGTAAGCTGTTGGATTGCCTTGCAACGTTCATATTTTTGTTGTACATC |
| | | | | ATTCTGCTTTTACTTTACGGAGCCTGATTTTGATTAATGGGGATTTTG |
| | | | | ACTCAGCTCACTGGAGATTTGAACAAGATGGTTGCTCTACAGAGAT |
| | | | | TGCTCGAACCGTATGGAATCTGTGAGGTAAGATAGTATTTTTGGAC |
| | | | | AATATAGAGTTTCCTGAATGGATAAAAGCATTATTGTTTTTATGTTT |
| | | | | GCTGTTTTCTAATTGATTTCCGCAATAGAAATGTCAAAATTATCCTAT |
| | | | | TGCAGGTCTTATTGTCATTGATGCTCCTTATTCCATAATGCAATCACC |
| | | | | ATTTGCTTATATTAAACACAATGTGTACATATCTTTTTGATTTCAGCC |
| | | | | ATAATAATCCAAAGTTTACAGAGAAAAAGATGTTTCGTTCACG |
| 1716 | Amaranthus | gDNA | 1125 | ATCATCCAAGGTATTTGAAACATACTTGGAGTAATTTCTTTCTCTTCC |
| | rudis | Contig | | AACATTATAATGTCGATTTATGTGATTTGTGCTAAAGTGACACTTCA |
| | | | | TGTACCCTATCTTCCATCGACTTAATTTAAACTATCGTGACTTCAACT |
| | | | | CTTGTCTTCATCGTTATAACTTAGCTTCTACCCATTCCGCGACTTCAT |
| | | | | TTTCATCTACCTTGATATACCTTGATATAGCTTATCATTAATATTTTTC |
| | | | | TCATAATAATTCAAAAGTTTGCATCTATCTAATTTTAGTGCTACAAGT |
| | | | | GTTGCTTGTAGTAATTCTGTCTTGTTAGATTGTGGTGTGTGAACTAT |
| | | | | GTATTTTTCGTGAATTGTTGCATTTCTTGAATGACTTGTCTCTAGAAT |
| | | | | GATGCTCCTTAAACTTACTTCTTTTGTTTCATGTATGTTTAAGGGAGA |
| | | | | GACGACATACAATATCAGTATTTGTGGGGGATGAAAGTGGAATGAT |
| | | | | TAATCGAATAGCAGGGGTTTTTGCCAGAAGAGGTTATAATATCGAA |
| | | | | TCACTCGCTGTTGGATTGAACAAGGACAAAGCTCTCTTCACTATTGT |
| | | | | AGTTTCTGGAACGGATAATGTGTTGCAGCAAGTGATGGAACAGCTT |
| | | | | CAAAAGCTTGTCAATGTTTTGAAGGTTATTTTCCTTTAGAATAATTAC |
| | | | | CGTGGCATCCATGTCTTCAATTGTTTAGAATTCTCATCACTAAGTACA |
| | | | | ACTTATACATATAGGTTGAAGATATATCCAAGGAGCCTCAAGTAGA |
| | | | | ACGTGAATTGATGCTTGTAAAAGTTGGAGCTGATCGGAATAACCGT |
| | | | | GCTGAGGTACCTAATAATATATGTCACAGTACCCAACTGTACAAAAT |
| | | | | AGTTGATCTTATTAGATACAGACAGATATATTAGCTAGATCTCTATG |
| | | | | TTTTTTGTGGTGACTATTGACTTTCTGCTACATGCTGATCTTTCTTAG |
| | | | | TTTTCTCCTAGTAAATTGTAATTTTTAATATATAATTTGTTATTCCACT |
| | | | | ATGTCTGTTCCTGATTTACTTTCACTGATCATATTGTTCGTGTTTCTTC |
| | | | | TATTGTAGCTGATGTGGTTGGTGGACATCTTTCGTGCCAAAATTGTG |
| | | | | GACATATCGGAAGAGTATCTTTCAATAGAGGTAA |
| 1717 | Amaranthus | gDNA | 1029 | CTTTCTAGTCTCTTCCCCCCTCCCACCCTTCAATAGCTTATCCTTTCAT |
| | rudis | Contig | | GCCGTCCAACAAAATTTGAACTCATATCCTTGTGTATGATCGGAGAA |
| | | | | AGTAATGATTGAATCATTAATGATGCTCATCCTTGGTGAATTTATCT |
| | | | | CTTTTTATCCAGTCTTTGAGTCTCCTGGTTCAGGAACGCTGCCTATTA |
| | | | | ATCATTCCAAATCTCTTGAATAAAAGTCATTTTAAAATTATCATATGT |
| | | | | ATATCATTCCGTGCTGTTATTTTTCTTACATGTATTTTGCTATCATTAG |
| | | | | CGTGATAAAAAAATGTATTTTCATTCATTTCCAGGGTGATGCGCCAC |
| | | | | ACAATTTCTGTCTTTGTTGGGGATGAAAGTGGTATAATCAATAGGAT |
| | | | | TGCCGGCGTTATTTCTAGGAGAGGATACAACATAGAGTCTCTGGCT |
| | | | | GTTGGTTTAAATAAGGATAAGGCTCTTTTTACTATAGTAGTGTGTGG |
| | | | | GAATGACAAGGTGTTGCGCCAAGTAATGGAGCAGCTCAGCAAGCT |
| | | | | TGTTAGTGTCTTAAAGGTAGACATCACCTTTTTTCTTCCTTTAAAGTT |
| | | | | TAAGGTAACTAGTGATACTTTCATTTAGTAGGGGCGGTCAATGGTG |
| | | | | ATATTGATGCTAACCATGTATGTTCATTTTGTTTATGAAATATTGCTC |
| | | | | ATTTTGACTTTATCATTGTTGTTAAACTCTGAGAAAATGTAATCTCTA |
| | | | | AAGCATCTATCCTCACTTTAAGATAGATAGAGCAGGGAAACACTCA |
| | | | | TGATTCTTTTAATAAACTTTCAAAATATTAAAATTCCCTTTCCCTAAT |
| | | | | GCAGTTTTATAGCTCCCAGCTAATCTGAGTTCAAGGGGTTTGAGTGT |
| | | | | ATGCAAGCATACTCGTATAACAACAAAATGGTTGTCTCGGATTGAC |
| | | | | CCTTAAAATCAAATACCATCTTGCAAATTCACTTAAATACATACTTCA |
| | | | | ACGAACTGTTTTATAGTAGTCCATTAAAATTCGTAAGCAAAGAATTA |
| | | | | TAAAATTTTTTATTCCGTCGAGAATAGACACAATAAA |
| 1718 | Amaranthus | gDNA | 713 | TATTCTGATGTACTTTCGACATGCCAGTCAAGCGGACTTATGTCACA |
| | rudis | Contig | | TACTCTGTCCATGCTGGTAAATAATGCTCCTGGAGTTCTGAACACCG |
| | | | | TTACAGGAGTAATTGCTCGTAGAGGTTATAACATTCAGGTCAGTAT |
| | | | | GGACTCTGACTGCACCATGAAAGTATATCCCGTCTTTTGCATTATGT |
| | | | | TAACTTGATTGTCCCTTTTTCCTTCTTCCTAGAGTCTTGCTGTGGGCC |
| | | | | CTGCTGAAAAGGAGGGTCTTTCTCGTATCACCACCGTTGTTCCTGGA |
| | | | | AACGACGAGTCAATTGCAAAATTGGTTCAGCAATTAAACAAATTAG |
| | | | | TAGACCTTCATGAGGTGAGCATCTATTTGTGTACATCGTAAGCATAA |
| | | | | TTGTCCAAATTAGTTAGTGTCATGTTTACTTATGTCGTTAATATTTAA |
| | | | | TACTATTTTGATATTTGTTTTTTCGACTATTATGATTGAAAGATTAGA |
| | | | | ATATCTTATTCCGGAAAGGTTGTGGTCGCAGATTCAGGACCTTACTC |
| | | | | ACCAGCCATTTGCAGAGCGAGAGCTTATGTTAATTAAAGTAGCGGC |
| | | | | AAATACTTCTGCCAGGAGAGACGTCCTTGATATTGCTAATATTTTCC |
| | | | | GTGCAAAACCTGTGGATGTTTCTGATCATACAATAACATTACAAGTA |
| | | | | CGCATAAATGATTTTGCCATTTTATTTAGCCTTCTCTTGTTACTCTCA |
| | | | | ACAATGT |
| 1719 | Amaranthus | cDNA | 1392 | CTACCATCTCCATTCTCCCCATTTCATTTCTTTCTCATAACTCTCTAAT |
| | spinosus | Contig | | GGCGGCCATTTCCTTTAACATCAATGGCGGAAAGATCGGAACTTTA |
| | | | | TGTCCAAAACCTAAATATGGTTGTGGGTTTTTGAGAAAATGGGATTT |
| | | | | TGGAGCTCATACAACTGTATCTACTAAACCCATGTCAAAAATTTTAA |
| | | | | GCTTGAAAGCAGTTGAAGTTTCTGCTGATGCTACAGTAAATGCAGT |
| | | | | TTCTGTTTCATCTAATTCTAGGGTGATGCGCCACACAATTTCAGTCTT |
| | | | | TGTCGGGGATGAAAGTGGTATAATCAATAGGATTGCAGGCGTTATT |
| | | | | TCTAGAAGAGGATACAATATCGAGTCTTTGGCTGTTTGTTTAAACAA |
| | | | | GGATAAGGCTCTTTTTACTATAGTAGTGTGTGGAACTGACAAGGTG |
| | | | | TTGCGCCAAGTAATGGAGCAGCTCAGCAAGCTTGTTAATGTCTTAA |
| | | | | AGGTTGAAGATCTATCTAGAGAGCCTCAAGTGGAACGTGAGCTTAT |
| | | | | GCTATTAAAGCTTCATTCTAATGCAGATACCCATGCAGAGATAATGT |
| | | | | GGTTAGTGGACATCTTCAGAGCAAAAATTGTCGATATGTCGGAAAG |
| | | | | CTTCGTTACTGTAGAGGTGACTGGTGATCCTGGAAAGATGGCTGCT |
| | | | | GTCCTGAGAAATTTTAGCAAGTATGGAATCAAAGAAGTTGCAAGAA |
| | | | | CAGGAAAGATTGCTCTAAGACGGGAAAGGATGGGCCAGACAGCTC |
| | | | | CTTTTTGGAGATTCTCTGCTGCATCTTATCCAGATCTAAAAGAAAAG |
| | | | | GCTGTTGAATCTTTTGTCAGGCCTGCCAAAAGAAACATCAACGCTG |
| | | | | ATCCTGGCTCATCGTCTAGTGGTGATGTTTATCCAGTGGAGCCTTAT |
| | | | | GAAGCCTCCATAAATACAGTACTTGATGCTCACTGGGGCGTTCTTTA |
| | | | | CGAAAATGATTCAAGCGGACTTGTATCACATACTCTGTCCATGCTGG |
| | | | | TAAATAATGCTCCTGGAGTTCTGAACACCGTTACAGGAGTAATTGCT |
| | | | | CGTAGAGGTTATAACATTCAGAGTCTTGCTGTGGGCCCTGCTGAAA |
| | | | | AGGAGGGTCTTTCTCGTATCACAACTGTTGTTCCTGGAAACGACGA |
| | | | | GTCAATTGCAAAATTGGTTCAGCAATTAACAAATTAGTAGACCTTCA |
| | | | | TGAGATTCAGGACCTTACGCACCAGCCATTTGCAGAGCGAGAGCTT |
| | | | | ATGTTAATTAAAGTAGCTGCAAATACTACAGCCAGGAGAGATGTCC |
| | | | | TTGATATTGCTAATATTTTCCGTGCAAAAGCTGTGGATGTTTCGGAT |
| | | | | CACACGATAACATTACAGCTTACGGGTGATTTACACAAAATGGTTG |
| | | | | CGCTACAGAGACTATTGGAGCCTTATGGCATTTGTGAGGTGGC |
| 1720 | Amaranthus | cDNA | 579 | CTACCATCTCCATTCTCCCCATTTCATTTCTTTCTCATAACTCTCTAAT |
| | spinosus | Contig | | GGCGGCCATTTCCTTTAACATCAATGGCGGAAAGATCGGAACTTTA |
| | | | | TGTCCAAAACCTAAATATGGTTGTGGGTTTTTGAGAAAATGGGATTT |
| | | | | TGGAGCTCATACAACTGTATCTACTAAACCCATGTCAAAAATTTTAA |
| | | | | GCTTGAAAGCAGTTGAAGTTTCTGCTGATGCTACAGTAAATGCAGT |
| | | | | TTCTGTTTCATCTAATTCTAGGGTGATGCGCCACACAATTTCAGTCTT |
| | | | | TGTCGGGGATGAAAGTGGTATAATCAATAGGATTGCAGGCGTTATT |
| | | | | TCTAGAAGAGGATACAATATCGAGTCTTTGGCTGTTTGTTTAAACAA |
| | | | | GGATAAGGCTCTTTTTACTATAGTAGTGTGTGGAACTGACAAGGTG |
| | | | | TTGCGCCAAGTCGTGGAACAGCTTAACAAGCTTGTTAGTGTTTTGAA |
| | | | | GGTTGAAGATCTATCGAGAGAGCCACAAGTGGAACGTGAACTGAT |
| | | | | GCTTGTAAAGCTTAATTCTGATTCAAATTCCCACGCAGAGCTAATGT |
| | | | | GGCTAGTGGACATCTTCA |
| 1721 | Amaranthus | cDNA | 497 | CTCATCAGGCCGAGTTAGCTGTGTTTCAAATTTCCATCCATGGAGGC |
| | spinosus | Contig | | TGTGTCGACTCACCTTTCAACGAGTTTTAACTCCATTCCGAAAAGCA |
| | | | | ATAGATTGAGCCACCAAACTGCAAAACGATTAGGGTTCTCCTTGAA |
| | | | | ACCCCATTCTCTGGGTTTTAAGTTTAACTCCAATAGTGACAGGAATT |
| | | | | CGGAGTTTGATAAACTGGTTGTATCTGCAAGCAATGTTGATCAACT |
| | | | | GGGAAATCAAAGTAACTTATCCTTTAATCCCCCTTCTCCCTCTCGATC |
| | | | | AAAGGAGAGACGACATACAATATCAGTATTTGTGGGGGATGAAAG |
| | | | | TGGAATGATTAATCGAATAGCAGGGGTTTTGCCAGAAGAGGTTATA |
| | | | | ATATCGAATCACTCGCTGTTGGATTGAACAAGGACAAAGCTCTCTTC |
| | | | | ACTATTGTAGTTTCCGGAACGGATAATGTGCTGCAGCAAGTGATGG |
| | | | | AACAGCTTCAAAAGCTTGTCAATGTTTTGAAG |
| 1722 | Amaranthus | cDNA | 495 | TCTCTAATGGCGGCTGTTTCCTTCAATATTAATGGTGGAAAGATTGG |
| | thunbergii | Contig | | AATTTTATGTTCAAGACACGAATTCGGTTGTGGGTTTGTAAGAAAAT |
| | | | | TGGATTTTAGAACTCATACTTCTATATTTGAAAAACATATGCCAAAA |
| | | | | ACTTCAAGTTTTAAAGCAATGGAAGTTTCTGCAAATGCAACAGTAA |
| | | | | ATATAGTTCCAGTTTCAGCTCATTCTAGGGTGATGCGCCACACAATT |
| | | | | TCAGTCTTTGTTGGGGATGAAAGTGGTATAATCAATAGGATTGCCG |
| | | | | GCGTTATTTCTAGGAGAGGATACAACATAGAGTCTCTTGCTGTTGGT |
| | | | | TTAAATAAGGATAAGGCTCTTTTTACTATAGTAGTGTGTGGAACTGA |
| | | | | CAAGGTGTTGCGCCAAGTAATGGAGCAGCTCAGCAAGCTTGTTAAT |
| | | | | GTCTTAAAGGTTGAAGATCTATCTAGAGAGCCTCAAGTGGAACGTG |
| | | | | AACTTATGCTATTAAAGCTTCATTCTAAT |
| 1723 | Amaranthus | cDNA | 1729 | CTACCATCTCCATTCTCCCCATTTCATTTCTTTCTCATCTCTCTCCAAT |
| | viridis | Contig | | GGCGGCCATTTCCTTTAACATCAATGGCGGAAAGATTGGAACTTTAT |
| | | | | GTCCAAAACCTAAATATGGTTGTGGGTTTTTGAGAAAATGGGATTTT |
| | | | | GGAGCTCATACAACTGTATATACTAAACCCATGTCAAAAATTTCAAG |
| | | | | CCTGAAAGCAGTTGAAGTTTCTACCAATGCTACAGTAAAATGCAGTT |
| | | | | TCTGTTTCAGCTAATTCTAGGGTGATGCGATCACACAATTTCTGTCTT |
| | | | | TGTCGGGGATGAAAGTGGATAATCAATAGGATTGCAGGTGTTATTT |
| | | | | CTAGAAGAGGATACAATATCGAGTCTTTGGCTGTTTGTTTAAACAA |
| | | | | GGATAAGGCTCTTTTTACTATAGAAGTGTGTGGAACTGACAAGGTG |
| | | | | TTGCGCCAAGTCGTGGAACAGCTTAACAAGCTTGTTAGTGTTTTGAA |
| | | | | GGTTGAAGATCTATCGAGAGAGCCACAAGTGGAACGTGAACTGAT |
| | | | | GCTTGTAAAGCTTAATTCTGATGCAATTCCCACGCAGAGCTAATGTG |
| | | | | GCTAGTGGACATCTTCAGGGCAAAAATTGTGGATATCTCAGAAAGC |
| | | | | TTGGTCACTGTTGAGGTGACCGGAGATCCTGGAAAGTTGGCTGCTG |
| | | | | TCCTAAGAAATTTTAGAAAGTTTGGAATCAAAGAAATTGCAAGGAC |
| | | | | CGGTAAGATTGCTCTAAGACGAGAAAGGATGGGCCAGACAGCTCC |
| | | | | TTTTTGGAGATTCTCTGCTGCATCTTATCCAGATCTACAAGAAAAGG |
| | | | | CTGTTGATGATCTGGCCAGGCCTACGAAACGGAGCATCAATGGTGA |
| | | | | TTCTGGCTCATCTTCAAGTGGTGATGTTTATCCGGTGGAACCTTATG |
| | | | | ATGGTTCGATGGTAAATCAAGTACTTGATGCTCACTGGGGCGTACT |
| | | | | TTATGACGGTGATTCAAGTGGTCTCCGGTCACATACTCTGTCCATGC |
| | | | | TGGTAAATAATGCTCCTGGAGTTCTGAACACCGTTACAGGAGTAAT |
| | | | | TGCTCGTAGAGGTTATAACATTCAGAGTCTTGCTGTGGGCCCTGCT |
| | | | | GAAAAGGAGGGTCTTTCTCGTATCACAACTGTTGTTCCTGGAAACG |
| | | | | ACGAGTCAATTGCAAAATTGGTTCAGCAATTAAACAAATTAGTAGA |
| | | | | CCTTCATGAGATTCAGGACCTTACGCACCAGCCATTTGCAGAGCGA |
| | | | | GAGCTTATGTTAATTAAAGTAGCGGCAAATACTTCTGCCAGGAGAG |
| | | | | ACGTCCTTGATATTGCTAATATTTTCCGTGCGAAACCTGTGGATGTT |
| | | | | TCTGATCACACAATAACATTACAACTTGCTGGTGATTTAGACAAAAT |
| | | | | GGTTGCGCTACAGAGATTATTGGAGCCTTACGGCATTTGTGAGGTG |
| | | | | GCACGGACTGGAAGAGTAGCACTAACGAGAGAGTCTAGGGTAGAT |
| | | | | TCCAAATATCTACGAGGATACACTCTTCCGTTGTATGAATGAAAAAC |
| | | | | TCGGGCTATGTCTTTCCGACATTACCTTGTCTGATTCCTTCCGCTCTT |
| | | | | CTACACTGCATTGCAAGCAGAACAATTGCCCACAAGTGGAGTAAAT |
| | | | | TAAAAGGGGAAACAACAATACCGATCTTTGCTTTGAAGATATACTG |
| | | | | ATTTGTATAACAATAGAGTTTGTATTTGACTAGTATTTATTTGCTCAA |
| | | | | CGCTGTAATAACATATCCCCTTGAGGTTTGATATATGGAAGGAAAA |
| | | | | ATTACCCAG |
| 1724 | Amaranthus | cDNA | 1726 | CTACCATCTCCATTCTCCCCATTTCATTTCTTTCTCATCTCTCTCCAAT |
| | viridis | Contig | | GGCGGCCATTTCCTTTAACATCAATGGCGGAAAGATTGGAACTTTAT |
| | | | | GTCCAAAACCTAAATATGGTTGTGGGTTTTTGAGAAAATGGGATTTT |
| | | | | GGAGCTCATACAACTGTATATACTAAACCCATGTCAAAAATTTCAAG |
| | | | | CCTGAAAGCAGTTGAAGTTTCTACCAATGCTACAGTAAAATGCAGTT |
| | | | | TCTGTTTCAGCTAATTCTAGGGTGATGCGATCACACAATTTCTGTCTT |
| | | | | TGTCGGGGATGAAAGTGGATAATCAATAGGATTGCAGGTGTTATTT |
| | | | | CTAGAAGAGGATACAATATCGAGTCTTTGGCTGTTTGTTTAAACAA |
| | | | | GGATAAGGCTCTTTTTACTATAGAAGTGTGTGGAACTGACAAGGTG |
| | | | | TTGCGCCAAGTCGTGGAACAGCTTAACAAGCTTGTTAGTGTTTTGAA |
| | | | | GGTTGAAGATCTATCGAGAGAGCCACAAGTGGAACGTGAACTGAT |
| | | | | GCTTGTAAAGCTTAATTCTGATGCAATTCCCACGCAGAGCTAATGTG |
| | | | | GCTAGTGGACATCTTCAGGGCAAAAATTGTGGATATCTCAGAAAGC |
| | | | | TTGGTCACTGTTGAGGTGACCGGAGATCCTGGAAAGTTGGCTGCTG |
| | | | | TCCTAAGAAATTTTAGAAAGTTTGGAATCAAAGAAATTGCAAGGAC |
| | | | | CGGTAAGATTGCTCTAAGACGAGAAAGGATGGGCCAGACAGCTCC |
| | | | | TTTTTGGAGATTCTCTGCTGCATCTTATCCAGATCTACAAGAAAAGG |
| | | | | CTGTTGAATCTTTTGTCAGGCCTGCCAAAAGAAACATCAACGCTGAT |
| | | | | CCTGGCTCATCGTCTAGTGGTGATGTTTATCCAGTGGAGCCTTATGA |
| | | | | AGCCTCCATAAATACAGTACTTGATGCTCACTGGGGCGTTCTTTACG |
| | | | | AAAATGATTCAAGCGGACTTGTATCACATACTCTGTCCATGCTGGTA |
| | | | | AATAATGCTCCTGGAGTTCTGAACACCGTTACAGGAGTAATTGCTC |
| | | | | GTAGAGGTTATAACATTCAGAGTCTTGCTGTGGGCCCTGCTGAAAA |
| | | | | GGAGGGTCTTTCTCGTATCACAACTGTTGTTCCTGGAAACGACGAG |
| | | | | TCAATTGCAAAATTGGTTCAGCAATTAAACAAATTAGTAGACCTTCA |
| | | | | TGAGATTCAGGACCTTACGCACCAGCCATTTGCAGAGCGAGAGCTT |
| | | | | ATGTTAATTAAAGTAGCGGCAAATACTTCTGCCAGGAGAGACGTCC |
| | | | | TTGATATTGCTAATATTTTCCGTGCGAAACCTGTGGATGTTTCTGAT |
| | | | | CACACAATAACATTACAACTTGCTGGTGATTTAGACAAAATGGTTGC |
| | | | | GCTACAGAGATTATTGGAGCCTTACGGCATTTGTGAGGTGGCACGG |
| | | | | ACTGGAAGAGTAGCACTAACGAGAGAGTCTAGGGTAGATTCCAAA |
| | | | | TATCTACGAGGATACACTCTTCCGTTGTATGAATGAAAAACTCGGGC |
| | | | | TATGTCTTTCCGACATTACCTTGTCTGATTCCTTCCGCTCTTCTACACT |
| | | | | GCATTGCAAGCAGAACAATTGCCCACAAGTGGAGTAAATTAAAAGG |
| | | | | GGAAACAACAATACCGATCTTTGCTTTGAAGATATACTGATTTGTAT |
| | | | | AACAATAGAGTTTGTATTTGACTAGTATTTATTTGCTCAACGCTGTA |
| | | | | ATAACATATCCCCTTGAGGTTTGATATATGGAAGGAAAAATTACCCAG |
| 1725 | Amaranthus | cDNA | 1565 | CTACCATCTCCATTCTCCCCATTTCATTTCTTTCTCATCTCTCTCCAAT |
| | viridis | Contig | | GGCGGCCATTTCCTTTAACATCAATGGCGGAAAGATTGGAACTTTAT |
| | | | | GTCCAAAACCTAAATATGGTTGTGGGTTTTTGAGAAAATGGGATTTT |
| | | | | GGAGCTCATACAACTGTATATACTAAACCCATGTCAAAAATTTCAAG |
| | | | | CCTGAAAGCAGTTGAAGTTTCTACCAATGCTACAGTAAAATGCAGTT |
| | | | | TCTGTTTCAGCTAATTCTAGGGTGATGCGATCACACAATTTCTGTCTT |
| | | | | TGTCGGGGATGAAAGTGGATAATCAATAGGATTGCAGGTGTTATTT |
| | | | | CTAGAAGAGGATACAATATCGAGTCTTTGGCTGTTTGTTTAAACAA |
| | | | | GGATAAGGCTCTTTTTACTATAGAAGTGTGTGGAACTGACAAGGTG |
| | | | | TTGCGCCAAGTCGTGGAACAGCTTAACAAGCTTGTTAGTGTTTTGAA |
| | | | | GGTTGAAGATCTATCGAGAGAGCCACAAGTGGAACGTGAACTGAT |
| | | | | GCTTGTAAAGCTTAATTCTGATGCAATTCCCACGCAGAGCTAATGTG |
| | | | | GCTAGTGGACATCTTCAGGGCAAAAATTGTGGATATCTCAGAAAGC |
| | | | | TTGGTCACTGTTGAGGTGACCGGAGATCCTGGAAAGTTGGCTGCTG |
| | | | | TCCTAAGAAATTTTAGAAAGTTTGGAATCAAAGAAATTGCAAGGAC |
| | | | | CGGTAAGATTGCTCTAAGACGAGAAAGGATGGGCCAGACAGCTCC |
| | | | | TTTTTGGAGATTCTCTGCTGCATCTTATCCAGATCTACAAGAAAAGG |
| | | | | CTGTTGATGATCTGGCCAGGCCTACGAAACGGAGCATCAATGGTGA |
| | | | | TTCTGGCTCATCTTCAAGTGGTGATGTTTATCCGGTGGAACCTTATG |
| | | | | ATGGTTCGATGGTAAATCAAGTACTTGATGCTCACTGGGGCGTACT |
| | | | | TTATGACGGTGATTCAAGTGGTCTCCGGTCACATACTCTGTCCATGC |
| | | | | TGGTAAATAATGCTCCTGGAGTTCTGAACACCGTTACAGGAGTAAT |
| | | | | TTCTCGTAGGGGTTATAACATTCAGAGTCTTGCTGTAGGCCCTGCTG |
| | | | | AAAAGGAGGGTCTTTCTCGTATCACAACTGTCATTCCTGGAAACGA |
| | | | | CGAGTCGATTGGAAAATTGGTTCAGCAATTCAACAAGTTAGTAGAC |
| | | | | CTTCATGAGATTCAGGACCTTACTCACCAGCCATTTTCAGAGCGAGA |
| | | | | GCTTATGTTGATCAAAATAGCTGCAAATACTACAGCCAGGAGAGAT |
| | | | | GTCCTTGATATTGCTAATATTTTCCGTGCAAAAGCTGTGGATGTTTC |
| | | | | GGATCACACGATAACATTACAGCTTGCGGGTGATTTACACAAAATG |
| | | | | GTTGCGCTACAAAGATTATTGGAGCCTTATGGCATTTGTGAGGTGG |
| | | | | CACGGACAGGAAGAGTCGCACTGAGTAGAGAGTCTGGGGTCGATT |
| | | | | CTACATCTTTACGTGGATACGCTCTTCCTTTGTACGAATAAAAATTCT |
| | | | | CCGGCTATGTCTTTTCGTCATTATTATGTCCCATTTCCTTCAGCACGT |
| | | | | CTGCGCTACATTTACATAGCGATCAATTG |
| 1726 | Amaranthus | cDNA | 1562 | CTACCATCTCCATTCTCCCCATTTCATTTCTTTCTCATCTCTCTCCAAT |
| | viridis | Contig | | GGCGGCCATTTCCTTTAACATCAATGGCGGAAAGATTGGAACTTTAT |
| | | | | GTCCAAAACCTAAATATGGTTGTGGGTTTTTGAGAAAATGGGATTTT |
| | | | | GGAGCTCATACAACTGTATATACTAAACCCATGTCAAAAATTTCAAG |
| | | | | CCTGAAAGCAGTTGAAGTTTCTACCAATGCTACAGTAAAATGCAGTT |
| | | | | TCTGTTTCAGCTAATTCTAGGGTGATGCGATCACACAATTTCTGTCTT |
| | | | | TGTCGGGGATGAAAGTGGATAATCAATAGGATTGCAGGTGTTATTT |
| | | | | CTAGAAGAGGATACAATATCGAGTCTTTGGCTGTTTGTTTAAACAA |
| | | | | GGATAAGGCTCTTTTTACTATAGAAGTGTGTGGAACTGACAAGGTG |
| | | | | TTGCGCCAAGTCGTGGAACAGCTTAACAAGCTTGTTAGTGTTTTGAA |
| | | | | GGTTGAAGATCTATCGAGAGAGCCACAAGTGGAACGTGAACTGAT |
| | | | | GCTTGTAAAGCTTAATTCTGATGCAATTCCCACGCAGAGCTAATGTG |
| | | | | GCTAGTGGACATCTTCAGGGCAAAAATTGTGGATATCTCAGAAAGC |
| | | | | TTGGTCACTGTTGAGGTGACCGGAGATCCTGGAAAGTTGGCTGCTG |
| | | | | TCCTAAGAAATTTTAGAAAGTTTGGAATCAAAGAAATTGCAAGGAC |
| | | | | CGGTAAGATTGCTCTAAGACGAGAAAGGATGGGCCAGACAGCTCC |
| | | | | TTTTTGGAGATTCTCTGCTGCATCTTATCCAGATCTACAAGAAAAGG |
| | | | | CTGTTGAATCTTTTGTCAGGCCTGCCAAAAGAAACATCAACGCTGAT |
| | | | | CCTGGCTCATCGTCTAGTGGTGATGTTTATCCAGTGGAGCCTTATGA |
| | | | | AGCCTCCATAAATACAGTACTTGATGCTCACTGGGGCGTTCTTTACG |
| | | | | AAAATGATTCAAGCGGACTTGTATCACATACTCTGTCCATGCTGGTA |
| | | | | AATAATGCTCCTGGAGTTCTGAACACCGTTACAGGAGTAATTTCTCG |
| | | | | TAGGGGTTATAACATTCAGAGTCTTGCTGTAGGCCCTGCTGAAAAG |
| | | | | GAGGGTCTTTCTCGTATCACAACTGTCATTCCTGGAAACGACGAGTC |
| | | | | GATTGGAAAATTGGTTCAGCAATTCAACAAGTTAGTAGACCTTCAT |
| | | | | GAGATTCAGGACCTTACTCACCAGCCATTTTCAGAGCGAGAGCTTAT |
| | | | | GTTGATCAAAATAGCTGCAAATACTACAGCCAGGAGAGATGTCCTT |
| | | | | GATATTGCTAATATTTTCCGTGCAAAAGCTGTGGATGTTTCGGATCA |
| | | | | CACGATAACATTACAGCTTGCGGGTGATTTACACAAAATGGTTGCG |
| | | | | CTACAAAGATTATTGGAGCCTTATGGCATTTGTGAGGTGGCACGGA |
| | | | | CAGGAAGAGTCGCACTGAGTAGAGAGTCTGGGGTCGATTCTACATC |
| | | | | TTTACGTGGATACGCTCTTCCTTTGTACGAATAAAAATTCTCCGGCT |
| | | | | ATGTCTTTTCGTCATTATTATGTCCCATTTCCTTCAGCACGTCTGCGC |
| | | | | TACATTTACATAGCGATCAATTG |
| 1727 | Amaranthus | cDNA | 1441 | GTCTTTCTTTGCACCCTGGTTGTCCTCGTCAGGCCGAGTTAGCTGTG |
| | viridis | Contig | | TTTCAAATTTCCATCCATGGAGGCTGTGTCGACTCACCTTTCAACGA |
| | | | | GTTTTAACTCCATTCCGAAAAGCAATAGATTGAACCACCAAACTGCA |
| | | | | AAACGATTAGGGTTCTCCTTGAAACCCCATTCTCTGGGTTTTAAGTT |
| | | | | TAACTCCAATAGTGACAGGAATTCGGAGTTTGATAAACTGGTTGTA |
| | | | | TCTGCAAGCAATGTTGATCAACTGGGAAATCAAAGTAACTTATCCTT |
| | | | | TAATCCCCCTTCTCCCTCTCGATCAAAGGAGAGACGACATACAATAT |
| | | | | CAGTATTTGTGGGGGATGAAAGTGGAATGATTAATCGAATAGCAG |
| | | | | GGGTTTTTGCCAGAAGAGGTTATAATATCGAATCACTCGCTGTTGG |
| | | | | ATTGAACAAGGACAAAGCTCTCTTCACTATTGTAGTTTCTGGAACGG |
| | | | | ATAATGTGTTGCAGCAAGTGATGGAACAGCTTCAAAAGCTTGTCAA |
| | | | | TGTTTTGAAGGTTGAAGATATATCCAAGGAGCCTCAAGTAGAACGT |
| | | | | GAATTGATGCTTGTAAAAGTTGGAGCTGATCGGAATAACCGTGCTG |
| | | | | AGCTGATGTGGTTGGTGGACATCTTTCGTGCCAAAATTGTGGACAT |
| | | | | ATCGGAAGAGTATCTTTCAATAGAGGTCACTGGAGATCCAGGAAAG |
| | | | | ATGGTTGCTGTCCTTAGAAACCTAAGCAAGTTTGGCATCAAAGAAA |
| | | | | TTGCTCGTACCGGAAAGATTGCTCTAAGAAGGGAAAAATTGGGCG |
| | | | | AGTCTGCTCCTTTCTGGCGTTTTTCTGCTGCTTCTTATCCTGATCTTG |
| | | | | AAGAAGCTATCCCTATGGATGCTCTTTCTGGAGTTTCAAAAGGGGC |
| | | | | AGCTGCTGCTGGATCATCGGATTCGTCTGTGGAGGGTGATGTTTAT |
| | | | | CCTGTGGAGCCGTTTGATGGTTTCTCCCTTCCAATCTTAGATGCTCAT |
| | | | | TGGGGTATTTTGAACGAAGAAGATACTAGTGGGATGCGGTCACAC |
| | | | | ACTCTATCTATTCTTGTTAATGACAAACCTGGGGTCCTTAATGTTGTT |
| | | | | ACGGGGGTTTTTGCTCGAAGGGGTTATAACATTCAGAGTTTAGCTG |
| | | | | TGGGTCATGCGGAAGGTGAGGGTCTATCTCGTATCACTACTGTTGT |
| | | | | ACCCGGTACAGATGAATCAATTAGCAAATTGGTTCAACAAATCTAC |
| | | | | AAGCTGGTTGATATTCATGAGGTTAGAGATCTTACCCATTATCCATT |
| | | | | TGCTGAGCGAGAGTTGATGTTGATAAAAGTAGCTGTGAATACTGCT |
| | | | | GCACGTCGTGAGGTCCTAGACGTTGCCAGCATTTTTAGAGCAAAAG |
| | | | | CTGTTGATGTATCTGATCACACCATAACACTTGAGCTCACTGGAGAT |
| | | | | TTGAACAAGATGGTTGCTCTACAGAGATTGCTCGAACCGTATGGAA |
| | | | | TCT |
| 1728 | Amaranthus | cDNA | 1257 | GAAGATCTATCTAGAGAGCCTCAAGTGGAACGTTGAGCTTATGCTA |
| | viridis | Contig | | TTAAAGCTTCATTCTAATGCAGATACCCATGCAGAGATAATGTGGTT |
| | | | | AGTGGACATCTTCAGAGCAAAAATTGTCGATATGTCGGAAAGCTTC |
| | | | | GTTACTGTAGAGGTGACTGGTGATCCTGGAAAGATGGCTGCTGTCC |
| | | | | TGAGAAATTTTAGCAAGTATGGAATCAAAGAAGTTGCAAGAACAG |
| | | | | GAAAGATTGCTCTAAGACGAGAAAGGATGGGCCAGACAGCTCCTTT |
| | | | | TTGGAGATTCTCTGCTGCATCTTATCCAGATCTACAAGAAAAGGCTG |
| | | | | TTGATGATCTGGCCAGGCCTACGAAACGGAGCATCAATGGTGATTC |
| | | | | TGGCTCATCTTCAAGTGGTGATGTTTATCCGGTGGAACCTTATGATG |
| | | | | GTTCGATGGTAAATCAAGTACTTGATGCTCACTGGGGCGTACTTTAT |
| | | | | GACGGTGATTCAAGTGGTCTCCGGTCACATACTCTGTCCATGCTGGT |
| | | | | AAATAATGCTCCTGGAGTTCTGAACACCGTTACAGGAGTAATTGCTC |
| | | | | GTAGAGGTTATAACATTCAGAGTCTTGCTGTGGGCCCTGCTGAAAA |
| | | | | GGAGGGTCTTTCTCGTATCACAACTGTTGTTCCTGGAAACGACGAG |
| | | | | TCAATTGCAAAATTGGTTCAGCAATTAAACAAATTAGTAGACCTTCA |
| | | | | TGAGATTCAGGACCTTACGCACCAGCCATTTGCAGAGCGAGAGCTT |
| | | | | ATGTTAATTAAAGTAGCGGCAAATACTTCTGCCAGGAGAGACGTCC |
| | | | | TTGATATTGCTAATATTTTCCGTGCGAAACCTGTGGATGTTTCTGAT |
| | | | | CACACAATAACATTACAACTTGCTGGTGATTTAGACAAAATGGTTGC |
| | | | | GCTACAGAGATTATTGGAGCCTTACGGCATTTGTGAGGTGGCACGG |
| | | | | ACTGGAAGAGTAGCACTAACGAGAGAGTCTAGGGTAGATTCCAAA |
| | | | | TATCTACGAGGATACACTCTTCCGTTGTATGAATGAAAAACTCGGGC |
| | | | | TATGTCTTTCCGACATTACCTTGTCTGATTCCTTCCGCTCTTCTACACT |
| | | | | GCATTGCAAGCAGAACAATTGCCCACAAGTGGAGTAAATTAAAAGG |
| | | | | GGAAACAACAATACCGATCTTTGCTTTGAAGATATACTGATTTGTAT |
| | | | | AACAATAGAGTTTGTATTTGACTAGTATTTATTTGCTCAACGCTGTA |
| | | | | ATAACATATCCCCTTGAGGTTTGATATATGGAAGGAAAAATTACCCAG |
| 1729 | Amaranthus | cDNA | 1254 | GAAGATCTATCTAGAGAGCCTCAAGTGGAACGTTGAGCTTATGCTA |
| | viridis | Contig | | TTAAAGCTTCATTCTAATGCAGATACCCATGCAGAGATAATGTGGTT |
| | | | | AGTGGACATCTTCAGAGCAAAAATTGTCGATATGTCGGAAAGCTTC |
| | | | | GTTACTGTAGAGGTGACTGGTGATCCTGGAAAGATGGCTGCTGTCC |
| | | | | TGAGAAATTTTAGCAAGTATGGAATCAAAGAAGTTGCAAGAACAG |
| | | | | GAAAGATTGCTCTAAGACGAGAAAGGATGGGCCAGACAGCTCCTTT |
| | | | | TTGGAGATTCTCTGCTGCATCTTATCCAGATCTACAAGAAAAGGCTG |
| | | | | TTGAATCTTTTGTCAGGCCTGCCAAAAGAAACATCAACGCTGATCCT |
| | | | | GGCTCATCGTCTAGTGGTGATGTTTATCCAGTGGAGCCTTATGAAG |
| | | | | CCTCCATAAATACAGTACTTGATGCTCACTGGGGCGTTCTTTACGAA |
| | | | | AATGATTCAAGCGGACTTGTATCACATACTCTGTCCATGCTGGTAAA |
| | | | | TAATGCTCCTGGAGTTCTGAACACCGTTACAGGAGTAATTGCTCGTA |
| | | | | GAGGTTATAACATTCAGAGTCTTGCTGTGGGCCCTGCTGAAAAGGA |
| | | | | GGGTCTTTCTCGTATCACAACTGTTGTTCCTGGAAACGACGAGTCAA |
| | | | | TTGCAAAATTGGTTCAGCAATTAAACAAATTAGTAGACCTTCATGAG |
| | | | | ATTCAGGACCTTACGCACCAGCCATTTGCAGAGCGAGAGCTTATGT |
| | | | | TAATTAAAGTAGCGGCAAATACTTCTGCCAGGAGAGACGTCCTTGA |
| | | | | TATTGCTAATATTTTCCGTGCGAAACCTGTGGATGTTTCTGATCACA |
| | | | | CAATAACATTACAACTTGCTGGTGATTTAGACAAAATGGTTGCGCTA |
| | | | | CAGAGATTATTGGAGCCTTACGGCATTTGTGAGGTGGCACGGACTG |
| | | | | GAAGAGTAGCACTAACGAGAGAGTCTAGGGTAGATTCCAAATATCT |
| | | | | ACGAGGATACACTCTTCCGTTGTATGAATGAAAAACTCGGGCTATG |
| | | | | TCTTTCCGACATTACCTTGTCTGATTCCTTCCGCTCTTCTACACTGCAT |
| | | | | TGCAAGCAGAACAATTGCCCACAAGTGGAGTAAATTAAAAGGGGA |
| | | | | AACAACAATACCGATCTTTGCTTTGAAGATATACTGATTTGTATAAC |
| | | | | AATAGAGTTTGTATTTGACTAGTATTTATTTGCTCAACGCTGTAATA |
| | | | | ACATATCCCCTTGAGGTTTGATATATGGAAGGAAAAATTACCCAG |
| 1730 | Amaranthus | cDNA | 1090 | GAAGATCTATCTAGAGAGCCTCAAGTGGAACGTTGAGCTTATGCTA |
| | viridis | Contig | | TTAAAGCTTCATTCTAATGCAGATACCCATGCAGAGATAATGTGGTT |
| | | | | AGTGGACATCTTCAGAGCAAAAATTGTCGATATGTCGGAAAGCTTC |
| | | | | GTTACTGTAGAGGTGACTGGTGATCCTGGAAAGATGGCTGCTGTCC |
| | | | | TGAGAAATTTTAGCAAGTATGGAATCAAAGAAGTTGCAAGAACAG |
| | | | | GAAAGATTGCTCTAAGACGAGAAAGGATGGGCCAGACAGCTCCTTT |
| | | | | TTGGAGATTCTCTGCTGCATCTTATCCAGATCTACAAGAAAAGGCTG |
| | | | | TTGAATCTTTTGTCAGGCCTGCCAAAAGAAACATCAACGCTGATCCT |
| | | | | GGCTCATCGTCTAGTGGTGATGTTTATCCAGTGGAGCCTTATGAAG |
| | | | | CCTCCATAAATACAGTACTTGATGCTCACTGGGGCGTTCTTTACGAA |
| | | | | AATGATTCAAGCGGACTTGTATCACATACTCTGTCCATGCTGGTAAA |
| | | | | TAATGCTCCTGGAGTTCTGAACACCGTTACAGGAGTAATTTCTCGTA |
| | | | | GGGGTTATAACATTCAGAGTCTTGCTGTAGGCCCTGCTGAAAAGGA |
| | | | | GGGTCTTTCTCGTATCACAACTGTCATTCCTGGAAACGACGAGTCGA |
| | | | | TTGGAAAATTGGTTCAGCAATTCAACAAGTTAGTAGACCTTCATGA |
| | | | | GATTCAGGACCTTACTCACCAGCCATTTTCAGAGCGAGAGCTTATGT |
| | | | | TGATCAAAATAGCTGCAAATACTACAGCCAGGAGAGATGTCCTTGA |
| | | | | TATTGCTAATATTTTCCGTGCAAAAGCTGTGGATGTTTCGGATCACA |
| | | | | CGATAACATTACAGCTTGCGGGTGATTTACACAAAATGGTTGCGCT |
| | | | | ACAAAGATTATTGGAGCCTTATGGCATTTGTGAGGTGGCACGGACA |
| | | | | GGAAGAGTCGCACTGAGTAGAGAGTCTGGGGTCGATTCTACATCTT |
| | | | | TACGTGGATACGCTCTTCCTTTGTACGAATAAAAATTCTCCGGCTAT |
| | | | | GTCTTTTCGTCATTATTATGTCCCATTTCCTTCAGCACGTCTGCGCTA |
| | | | | CATTTACATAGCGATCAATTG |
| 1731 | Ambrosia | cDNA | 1616 | CTACCTACTCCGCCATAATCCACACTCAAAGAGCACCTTCTTCTTCTT |
| | trifida | Contig | | CCTAATCTACTTCCATCACCCAAACCTCTAGACCGTACACCGACCAG |
| | | | | TTTCTCTCCAACACTCTCTTCAAATCCTAACAAACCTTATCTCAAATC |
| | | | | ACTCTCTGTGCAAGCAACCAGTGCTTCCGTTTCCACCGCCCTTGATG |
| | | | | CCACTCCATCCATGGCAAGACCTAAGGTGAGGCGCCACACGATTTC |
| | | | | AGTATTTGTTGGTGATGAAAGTGGAATGATAAATCGGATTGCAGGA |
| | | | | GTTTTTGCAAGGAGGGGATATAATATCGAGTCCCTTGCTGTTGGTTT |
| | | | | AAACAAGGATAAGGCTCTTTTTACTATAGTTGTATCGGGAACTGAA |
| | | | | AGAGTGTTGGAGCAAGTTATGAAACAACTTCTAAAGCTCGTTAATG |
| | | | | TTTTAAAGGTTGAAGATATCTCAAAGGAGCCACAAGTAGAACGTGA |
| | | | | GTTGATGCTCATCAAGATAAATGCAGATCCAAGATACCGTTTGGAG |
| | | | | GTCAAGTGGTTAGTGGACATATTTAGAGCTAGAATTGTTGATATTTC |
| | | | | AGAGCACTCTATAACTATTGAGGTAACTGGTGACCCAGGGAAAATG |
| | | | | GTTGCGGTGCAAAGAAATTTAAGCAAGTTTGGGATCCAAGAAGTTG |
| | | | | CTAGGACCGGGAAGATTGCCTTGAGAAGAGAAAGAATGGGTGAAG |
| | | | | ATGCTCCTTTCTGGCGGTTTTCAGCAGCTTCATATCCTGACCTTGAA |
| | | | | GAAATGAACAAAAGAACTCCTCTTCAAGCCAAAAAGAGAACAGAGT |
| | | | | ATCAGGAATCTGATAAGCCTGCTGGGGGAGATGTTTATCCAGTAGA |
| | | | | TTCATCTGATGATTATTCATTCAATCAAGTTCTTGATGCACATTGGG |
| | | | | GTGTTCTTAATGAAGAAGATACAAGCGGGCTTCGTTCCCACACTTTA |
| | | | | TCAATCGTTGTAAATGACTCTCCTGGAGTTCTCAATATCGTAACAGG |
| | | | | AGTTTTTGCTCGCAGAGGCTATAATATTCAGAGTCTAGCAGTCGGTC |
| | | | | ATGCAGAAGTAGAGGGGCGTTCCCGCATCACAACTGTTGTCCCTGG |
| | | | | TACAGATGAGTCAATTGCAAAGTTGGTTCAACAACTATACAAGTTG |
| | | | | ATAGATGTGCATGATGTTGTGGATTTAACGTTGATGCCATTTGCCGA |
| | | | | ACGAGAATTGATGCTGATTAAGATTGCTGTGAATTCCACGGCCCGG |
| | | | | CGCAATGTTCTTGATATTGCAAGCATATTTAGGGCTAAAGCCGTAG |
| | | | | ACGTGTCAGATCATACAATTACACTTGAGGTTACTGGAGATCTGAAT |
| | | | | AAGATGGTTGCACTGCAGAGGTTGTTGGAACCTTGCGGAATTTGTG |
| | | | | AGGTGGCAAGAACAGGTCGCGTGGCACTGACCCGCGAGTCAGGCG |
| | | | | TTGATTCCTCTTACCTTCGTGGATATTCCTATCCTGTGTGATTTCTATC |
| | | | | TTTTATAGCTTCTTCCTGTTTCGGGTAGAGATTGTCAGTAATTTGGG |
| | | | | TGTTCTTTTTCTATCTGGTACCTAGTCTAAGTTGTATGTTTTTAACAA |
| | | | | TAGATTTTTGTTTTTTCATCCGACTTTTAAGACCCTGTTTTGACTCTAT |
| | | | | ATGAAGTTACATACGTAAATACATGCTATG |
| 1732 | Ambrosia | cDNA | 1597 | CCTTTGTCGGGAAAACCATAATGACGAAAACAGCCACCATTTCTTCT |
| | trifida | Contig | | CTCTCCTCGGCGGCTCATTGCCGCCGCCACACCATACAACCGGTGAC |
| | | | | ACTACAACCCACAAACCTAAAACCATTCAATAAAAAATGTTCAGCTC |
| | | | | CTTACACTCTAAAACCACTTAATGCTATCTCTGACAACAAATCTCCG |
| | | | | GCCACATTGCCACATATTCTTCCCCTTAACACACCACTTACTTCCAAG |
| | | | | GTGAAGCGTCACACGATCTCGGTGTTTGTTGGGGATGAAAGTGGTA |
| | | | | TTATAAATCGAATTGCGGGGGTGTTTGCTAGACGAGGTTATAATAT |
| | | | | CGAGTCGCTTGCGGTTGGTTTGAATAAGGATAAGGCTTTGTTTACT |
| | | | | ATTGTTGTCTCTGGGACTGAGAAGGTGTTGCAGCAAGTTGTAGAGC |
| | | | | AACTTAACAAGCTTGTTAATGTCTTGAAGGTGGAAGATCTTTCTCGG |
| | | | | GATCCGCAAGTAGAGCGGGAATTGATGCTTGTGAAGCTTAATGTTG |
| | | | | ATCCAAGCACAAAAGCTGAGATTATGTGGTTAGTAGACATCTTTAG |
| | | | | AGGCAATGTGGTGGATGCATCGGAATCCTCATTGACTATAGAGGTT |
| | | | | ACTGGGGATCCCGGGAAGATAGCTGCTGTTCAGAGGAATCTAGCTA |
| | | | | AGTTTGGAATCAAAGAACTTACAAGAACAGGAAAGATTGCGCTAAG |
| | | | | ACGGGAAAAAATGGGTGAAACTGCTCCGTTTTGGAACTTCTCTGCA |
| | | | | GCATCTTATCCAGATCTAGAAGCCCTGGGTCCTGTTGCTAGTATTAC |
| | | | | TAAAGTGGTTGACGAGACTCCTAGTACAACGTCAGGGGGGGGCGA |
| | | | | TGTTTATCCTGTGGATTCCTACGATAGCTGCTACGTAAGGGATCGAG |
| | | | | TTCTCGATGCCAATTGGGGCGTGCTATATGACGAAGATGCAACGGG |
| | | | | TCGTCAATCTCACACTTTGAACATTCTTGTGAATAATGCTCCTGGAG |
| | | | | TTCTCAACCTGGTCACCGGAGTTATATCCAGACGGGGTTATAACGTT |
| | | | | CAGAGTCTGGCTGTAGGTCCTGCAGAACTGGAAGGTTTATCTCGCA |
| | | | | TTACTACTGTGATTGCCGGCACAGACGAGTCTATTGGCAAGTTGGTT |
| | | | | CAGCAGTTCTACAAATTGATAGATGTTCATGAGGTCAAAGATATCA |
| | | | | CCTACTTACCATTTTCGGAACGCGAGTTAATGCTGATCAAAGTTGCT |
| | | | | GCAAGCCCTGCTGCTAGAAGGGATGTATTGGACATTGCCACCATCT |
| | | | | TCCGCGCCAAGCCTGTTGATGTTTCTGACCATACTATTACGCTAGAA |
| | | | | CTCACCGGAGACTTCAATAAGCTATTCGCCCTGCAAACGTTATTGGA |
| | | | | GACCTATGGAATTTGCGAGGTCGCAAGGACTGGTCGAGTGGCATT |
| | | | | GGTTAGAGAGTCAGGAGTCGATTCTACATATCTACGTGGGTTCTCT |
| | | | | ATGCCTCCAACTTGATTCAAGCCGATCCGATGGTTGCAAGGGTCCCC |
| | | | | ATCCGGTGGGCTACTTTTATGTTGCGACATGTAACTGTTACAGTTAT |
| | | | | TAGTCTTTATTGTTTGTTAGCTTAATATGTTGAAGACAGTTTCTAGTA |
| | | | | ATCATATGGTTTCACA |
| 1733 | Ambrosia | gDNA | 3632 | GTCATGTATTGCATTCTATGAGACTATGACTACTCAGGGACTATTTT |
| | trifida | Contig | | ATCAGTTTCTACAAGCTTACAGTGCTTATTGTCATGCTTTATGGAAG |
| | | | | TCTATGAAGTTTATTTTCGTTACAGTGCTTATGGTCTAATTTTGTTTT |
| | | | | GACTCAAGAAAACCTGTATATTTGTTTGAGTGATTTTTAATAAGACA |
| | | | | AAAATCTGTGGTTGCTATCATTATGCAATTTCTGAGTAAATTTGTTTT |
| | | | | TCTAGTTCCAAAACACATAATCGTCTTAGGCTCGGGACTTCACAATT |
| | | | | TTCTTTTTAATCTAACATACATAATCGTGTTTACGACTCATAATCAAT |
| | | | | ATGATTTGCTCTAATGTACCGGTAAAATAAACACTTTGTATCGCTTT |
| | | | | GTGCTATCATAAAGAGCTGATTGCCTGATAGAAGTTCTAAATAAATT |
| | | | | CTTTTTTTTTACGTTGGAATCTAGGTAACTGGTGACCCAGGGAAAAT |
| | | | | GGTTGCGGTGCAAAGAAATTTAAGCAAGTTTGGGATCCAAGAAGTT |
| | | | | GCTAGGACCGGGAAGGTAAGTAAATAGTGCATTCATAGTGTATTCA |
| | | | | AATGCATTAAACCTCCTAAGTTTATCTATTCTTTCTTTTGAAATAGTA |
| | | | | TTGTAATGATATAATTATTTTAATCATATTTAGTACTTAAGTTATTTG |
| | | | | CAAAATTCAAAAAGTGAATGAAAAGTTATTGGGGTCTGGCGGTCTG |
| | | | | CTCAACGTGAGCTGACTTGGACTTATAGTTACCTCCCTGACCATCTTT |
| | | | | AATGCTTTAGATTGCCTTGAGAAGAGAAAGAATGGGTGAAGATGCT |
| | | | | CCTTTCTGGCGGTTTTCAGCAGCTTCATATCCTGACCTTGAAGAAAT |
| | | | | GAACAAAAGAACTCCTCTTCAAGCCAAAAAGAGAACAGAGTATCAG |
| | | | | GAATCTGATAAGCCTGCTGGGGTAAGTTTCATATATTTTTGTTTTTG |
| | | | | CTGAAAGTTGTATTACCTTTTGATTAATTATAAACATTTTTTGTTTGT |
| | | | | GAAGGGAGATGTTTATCCAGTAGATTCATCTGATGATTATTCATTCA |
| | | | | ATCAAGTTCTTGATGCACATTGGGGTGTTCTTAATGAAGAAGATGT |
| | | | | AAGACCTTATTGTCAATTCTTAATTTCCACAAACATCATAAAAACAT |
| | | | | GGGAAGCATTTCAACAATTTTTTGTTTAATGTTTTTAGACAAGCGGG |
| | | | | CTTCGTTCCCACACTTTATCAATCGTTGTAAATGACTCTCCTGGAGTT |
| | | | | CTCAATATCGTAACAGGAGTTTTTGCTCGCAGAGGCTATAATATTCA |
| | | | | GGTATACTTTTTGTGGTGTTGAATGTTGATTTTACGTTTGTTTTCTTA |
| | | | | TTGTAATTATTTTAACAATTGCCAGAAATTGAAGTCTTTTTGGTGTTT |
| | | | | GTATTTTTTAAATATCAGAGTCTAGCAGTCGGTCATGCAGAAGTAG |
| | | | | AGGGGCGTTCCCGCATCACAACTGTTGTCCCTGGTACAGATGAGTC |
| | | | | AATTGCAAAGTTGGTTCAACAACTATACAAGTTGATAGATGTGCAT |
| | | | | GATGTGAGTATATATCACCGTTGGAAATTGCTTCATTTACTCGATTC |
| | | | | ATGTTATGTTTTAACTCAGATGAGTAAAGCTAAATGAAATTAACTAA |
| | | | | AAAGGAAAAGGATCGTAAGAGTCTAAAGTCTCTTGAAGTGTATTTT |
| | | | | TAATTAATAAAACCTCTAAAATCATTTTATTAATTCCATGATCATATC |
| | | | | TGACACTTTTATTTTTTGTGACAATCCAGTCTGCGCAAACAATTAGCT |
| | | | | GCATTTTGCTACTTGTACCCATTATGTTTAGTTTTTTGAGATGGTTCA |
| | | | | TAGGTCATTTCTCAGATTTTGAGGTTGCTCCGCTGAATTCATTCAATT |
| | | | | GAGTGACCAACAAACATATTTTTGTTTGTTCAGGTTGTGGATTTAAC |
| | | | | ATTGATGCCATTTGCCGAACGAGAATTGATGCTGATTAAGATTGCT |
| | | | | GTGAATTCAACGGCCCGACGCAATGTTCTTGATATTGCAAGCATATT |
| | | | | TAGGGCTAAAGCCGTAGATGTGTCAGATCATACAATTACACTTGAG |
| | | | | GTGAATTTTATTCACTTGCAGTTTATTTTCTGTCAAGTGAAAATTCTA |
| | | | | ATACTTATATTTTGAGTCGTTTCTAGAAAATTGCTCCATTTCTTCTTTT |
| | | | | GGGGAAAATTCCAGCTAGACCAAGGACAAGTGATGTGCTAATCTAA |
| | | | | TCCCATGCTTGTTCACAAAATAGAAACCACTAGTGAGACTAACCAG |
| | | | | AAGCCATCTTCATCTAAAGCCCATGCTTGTTGTTTGAGTGTTTGATG |
| | | | | TGAACCCAACCTTAGATAAATATGGTTCTGGGCCAAGTCTCATTACT |
| | | | | AGTGTTTAACTTACGATCATGGGGTTTTACATGATGTTAGGGAGGA |
| | | | | TAGTTAAGATTAGTGGTTGTCGGCCAAGCAAAATCATGTGGGGTTA |
| | | | | TTTATTTTATAAAAGAAATTTAGCCCAATTAAAAATCAAAAAAATAA |
| | | | | AAATAAGAAATACATACATTCGATTATGAACTATTTTAGAAGTATGA |
| | | | | TGCTCTTTTTTCTTCCAAAAGTAACCAAGATAGAACATAGTTTCGAA |
| | | | | GTTCAGTGGCATGGTGTGTGGAAAGTCTACATTGGAATGCATTTTG |
| | | | | TTATTGAATATAGTATTTAAATTATATATTTTTGAATAAATATTTAAG |
| | | | | CTTTTCAAATCGAGCTTGAGCCGATCTCAAATCCTCCTTGAGCTGAT |
| | | | | CTTAAATCATCCTTGAGCCGAGGTCATGCATGGCTACATTACCTTTT |
| | | | | GTTTGGTTTCTATACAAGAACCAATGCAACACAAACCGCATAGCATA |
| | | | | TACAATATGGCACATTATAAAGCTTCACTGAAACATTAAATCAATCA |
| | | | | CTGCATGTTCTTTATGATCCCTTATTTGTTTTACGTGTATTTTCTAGGT |
| | | | | TACTGGAGATCTGAATAAGATGGTTGCACTGCAGAGGTTGTTGGAA |
| | | | | CCTTGCGGAATTTGTGAGGTCTGTTTGTGAATCCCTTGTCTCCAATC |
| | | | | ATATTTTTATTAAACCCGACTTCATTCAAGGTTTAGACTTACACCCCT |
| | | | | GCTCGACGATCATTTGCAGGTGGCAAGAACAGGTCGCGTGGCACT |
| | | | | GACCCGCGAGTCAGGCGTTGATTCCTCTTACCTTCGTGGATATTCCT |
| | | | | ATCCTGTTTGATTTCTATCTTTTATAGCTTCTTCCTGTTTCGGGTAGA |
| | | | | GATTGTCAGTAATTTGGGTGTTCTTTTTCTATCTGGTACCTAGTCTAA |
| | | | | GTTGTATGTTTTTAACAATAGATTTTTGTTTTTTCATCCGACTTTTAA |
| | | | | GACCCTGTTTTGACTCTATATGAAGTTACATACGTAAATACATGCTA |
| | | | | TGTGTGGCCCTTTCTAGAAAAAGGTGAGTTAGGCATCGTGGGTTCG |
| | | | | GGTTAAACATGTCATTTATTGGTACAAGTCGCGGCGACTAGCTGGT |
| | | | | GGGCTGGGTTGCGGCAACCCACAAAACACTTGTTTGTTTGATTTTAG |
| | | | | TTTACCTTTTTTGAACAGGGAATTTATTTTACTTCTTAGAAGGTTTGT |
| | | | | GTTGATAGAATAGTTAATTCGATGACTAGTATGGTTTTGAAAACATT |
| | | | | GCATAAACCTTATTGAGATTGGCAGGAGGTAGGAATTAACTTGTAG |
| | | | | GAATTGATAGCCATTATGTGAAGTGAGGGGATGGTAAAGCAAAGC |
| | | | | TGATTATTGGGTG |
| 1734 | Ambrosia | gDNA | 1966 | GGTTACTGGGGATCCCGGGAAGATAGCTGCTGTTCAGAGGAATCTA |
| | trifida | Contig | | GCTAAGTTTGGAATCAAAGAACTTACAAGAACAGGAAAGGTAATTG |
| | | | | TTTAACGACTGTTTGTTTACGATGATTGGTTCTTGACTGAATTTGCTG |
| | | | | CTGCTTGTATGTAGATTGCGCTAAGACGGGAAAAAATGGGTGAAAC |
| | | | | TGCTCCGTTTTGGAACTTCTCTGCAGCATCTTATCCAGATCTAGAAG |
| | | | | CCCTGGGTCCTGTTGCTAGTATTACTAAAGTGGTTGACGAGACTCCT |
| | | | | AGTACAACGTCAGGGGTAGGTTGTTAAATTTTCAGGCTTCCTTCGCA |
| | | | | GCAATCATTGTTCTCTAACTCGGTATATTTTTATTTGAATGAAGGGG |
| | | | | GGCGATGTTTATCCTGTGGATTCCTACGATAGCTGCTACATAAGGG |
| | | | | ATCGAGTTCTCGATGCCAATTGGGGCGTGCTATATGACGAAGACGT |
| | | | | AAGTCATCGTCTCGTTACTATGTTTACGTTTCATTTCTGACACGCAAA |
| | | | | TTAATGCTGCAGGCAACGGGTCGTCAATCTCACACTTTGAACATTCT |
| | | | | TGTGAATAATGCTCCTGGAGTTCTCAACCTGGTCACCGGAGTTATAT |
| | | | | CCAGACGGGGTTATAACGTTCAGGTAAATTAACTTGTTTTAAGCAAT |
| | | | | CCGGTCCAGGCCTAGCTAACTTTAACGGTAATTGGTTGTTTGTTTGT |
| | | | | TTACAGAGTCTGGCTGTAGGTCCTGCAGAACTGGAAGGTTTATCTC |
| | | | | GCATTACTACTGTGATTGCCGGCACAGACGAGTCTATTGGCAAGTT |
| | | | | GGTTCAGCAGTTCTACAAATTGATAGATGTTCATGAGGTACAAAAG |
| | | | | TGTCCGTTATCGTTTTCACTGGTATGGAAAAATTAATGAAATACTAC |
| | | | | TCAGGTCAAAGATATCACCTACTTACCATTTTCGGAACGCGAGTTAA |
| | | | | TGCTGATCAAAGTTGCTGCAAGCCCTGCTGCTAGAAGGGATGTATT |
| | | | | GGACATTGCCACCATCTTCCGCGCCAAGCCTGTTGATGTTTCTGACC |
| | | | | ATACTATTACGCTAGAAGTAATGTTTCTTAATCCTTGTTTCTTTTTGTT |
| | | | | TTTCCTGTTTCTGATATCATCTTCCGTCTTCTATGTTATGTTCTAGCTC |
| | | | | ACCGGAGACTTCAATAAGCTATTCGCCCTGCAAACGTTATTGGAGA |
| | | | | CCTATGGAATTTGCGAGGTTTGTAACAGCATAATTAATTGTTTGTTT |
| | | | | GTTGGTAACAGTGCATGGTTGGTTACGTTATATTGTGTGTGTAGGT |
| | | | | CGCAAGGACTGGTCGAGTGGCATTGGTTAGAGAGTCAGGAGTCGA |
| | | | | TTCTACATATCTACGTGGGTTCTCTATGCCTCCAACTTGATTCAAGCC |
| | | | | GATCCGATGGTTGCAAGGGTCCCCATCCGGTGGGCTACTTTTATGTT |
| | | | | GCGACATGTAACTGTTACAGTTATTAGTTTTTATTGTTTGTTAGCTTA |
| | | | | ATATGTTGAAGACAGTTTCTAGTAATCATATTGGTTTCACATCAGAT |
| | | | | CAGATGCTATATATGCTAATAACTTGCAAAGTTCAGATCGCCTGCAG |
| | | | | AAGGTAAGCGATGAGTATTTAGACCAGACCAACTTATTATACGATA |
| | | | | TCAACATATTAATTAATATTGCCCTATCGGCAATACATTGCATTTTCA |
| | | | | CTTATCGAATTCTCAGGTTTCTGGATTTCTGCCCCATAACACACATGA |
| | | | | ACTCTGGACAAAAAATAATAATAATAATAATAATAATTTTAACAAGT |
| | | | | TATTGCCGATTTTTCTAGATGCTACGTTAAATCTTCAATAAAAAAACT |
| | | | | AAAGGAAAAAAAAAAATCAAAATTGCAGCTATTGAGTTATCTACCC |
| | | | | CAGATCCCTGCCACCGTGGACCACGCATGGGTGATGCGATGTTCCA |
| | | | | CGAATGAATCATTTTATGCCCTTAACACCACATGATCTTAGACTAGA |
| | | | | CGGTGTGGTTATAGGGTGAAGGGGGCATGAAGCGACATGTGACA |
| 1735 | Ambrosia | gDNA | 1865 | GGGTCCTGTTGCTAGTATTACTAAAGTGGTTGACGAGACTCCTAGT |
| | trifida | Contig | | ACAACGTCAGGGGTAGGTTGTTAAATTTTCAGGCTTCCTTCGCAGCA |
| | | | | ATCATTGTTCTCTAACTCGGTATATTTTTATTTGAATGAAGGGGGGC |
| | | | | GATGTTTATCCTGTGGATTCCTACGATAGCTGCTACGTAAGGGATCG |
| | | | | AGTTCTCGATGCCAATTGGGGCGTGCTATATGACGAAGATGTAAGT |
| | | | | CATCGTCTCGTTACTATGTTTACGTTTCATTTCTGACACGCAAATTAA |
| | | | | TGCTGCAGGCAACGGGTCGTCAATCTCACACTTTGAACATTCTTGTG |
| | | | | AATAATGCTCCTGGAGTTCTCAACCTGGTCACCGGAGTTATATCCAG |
| | | | | ACGGGGTTATAACGTTCAGGTAAATTAACTTGTTTTAAGCAATCCGG |
| | | | | TCCAGGCCTAGCTAACTTTAACGGTAATTGGTTGTTTGTTTGTTTGTT |
| | | | | TACAGAGTCTGGCTGTAGGTCCTGCAGAACTGGAAGGTTTATCTCG |
| | | | | CATTACTACTGTGATTGCCGGCACAGACGAGTCTATTGGCAAGTTG |
| | | | | GTTCAGCAGTTCTACAAATTGATAGATGTTCATGAGGTACAAAAGT |
| | | | | GTCCGTTATCGTTTTCACTGGTATGGAAAAATTAATGAAATACTACT |
| | | | | CAGGTCAAAGATATCACCTACTTGCCATTTTCGGAACGCGAGTTAAT |
| | | | | GCTGATCAAAGTTGCTGCAAGCCCTGCTGCTAGAAGGGATGTATTG |
| | | | | GACATTGCCACCATCTTCCGCGCCAAGCCTGTTGATGTTTCTGACCA |
| | | | | TACTATTACGCTAGAAGTAATGTTTCTTAATCCTTGTTTCTTTTTGTTT |
| | | | | TTCCTGTTTCTGATATCATCTTCCGTCTTCTATGTTATGTTCTAGCTCA |
| | | | | CCGGAGACTTCAATAAGCTATTCGCCCTGCAAACGTTATTGGAGAC |
| | | | | CTATGGAATTTGCGAGGTTTGTAACAGCATAATTAATTGTTTGTTTG |
| | | | | TTGGTTGGTCACAGTGCATGGTTGGTTACGTTATATTGTGTGTGTAG |
| | | | | GTCGCAAGGACTGGTCGAGTGGCATTGGTTAGAGAGTCAGGAGTC |
| | | | | GATTCTACATATCTACGTGGGTTCTCTATGCCCTTGTGATAGACGCA |
| | | | | CAAGTCCAACTTGATTCAAGCCGATCCGATGGTTGCAAGGGTCCCC |
| | | | | ATCCGGTGGGCTACTTTTATGTTGCGACATGTAACTGTTACAGTTAT |
| | | | | TAGTTTTTATTGTTTGTTAGCTTAATATGTTGAAGACAGTTTCTAGTA |
| | | | | ATCATATTGGTTTCACATCAGATCAGATGCTATATATGCTAATAACTT |
| | | | | GCAAAGTTCAGATCGCCTGCAGAAGGTAAGCGATGAGTATTTAGAC |
| | | | | CAGACCAACTTATTATACGATATCAACATATTAATTAATATTGCCCTA |
| | | | | TCGGCAATACATTGCATTTTCACTTATCGAATTCTCAGGTTTCTGGAT |
| | | | | TTCTGCCCCATAACACACATGAACTCTGGACAAAAAATAATAATAAT |
| | | | | AATAATAATTTTAACAAGTTATTGCCGATTTTTCTAGATGCTACGTTA |
| | | | | AATCTTCAATAAAAAAACTAAAGGAAAAAAAAATCAAAATTGCAGC |
| | | | | TATTGAGTTATCTACCCCAGATCCCTGCCACCGTGGACCACGCATGG |
| | | | | GTGATGCGATGTTCCACGAATGAATCATTTCATGCCCTTCACACCAC |
| | | | | ATGATCTTAGACTAGACGGTGTGGTTATAGGGTGAAGGGGCATAG |
| | | | | AGCGACATGTGCCAAATCTCTACCCAACCTGTCCAACGCCACAGAT |
| | | | | GGGGATGAATGCAATACGAAGAGAGGTAGAAAGCCAAGCACTGCA |
| | | | | CGGGGCCTCTCTGATGCCTACACTTTCCCGGGGGAGAG |
| 1736 | Ambrosia | gDNA | 1079 | TCTTTAACAAACTGTGTATGTTAAAAGGACTATAATGCCCCAGTTAT |
| | trifida | Contig | | ATGTTGATAACTAAGTGTGTGGTATGATTAATGAGCAGGGTGAAGC |
| | | | | GTCACACGATCTCGGTGTTTGTTGGGGATGAAAGTGGTATTATAAA |
| | | | | TCGAATTGCGGGGGTGTTTGCTAGACGAGGTTATAATATCGAGTCG |
| | | | | CTTGCGGTTGGTTTGAATAAGGATAAGGCTTTGTTTACTATTGTTGT |
| | | | | CTCTGGGACTGAGAAGGTGTTGCAGCAAGTTGTAGAGCAACTTAAC |
| | | | | AAGCTTGTTAATGTCTTGAAGGTCTCATCTTGTAATTTACGCTGCTAT |
| | | | | CGTCGTTCATTAATAACGTTGTTCCTAATGCGTTACTCAGTTTTGTTT |
| | | | | GATGTACCAGGTGGAAGATCTTTCTCGGGATCCGCAAGTAGAGCG |
| | | | | GGAATTGATGCTTGTGAAGCTTAATGTTGATCCAAGCACAAAAGCT |
| | | | | GAGGTACGTACTTATATGATGTTTCTTGCAATTTATCATTTAATTATG |
| | | | | CGTTCCTGTTCAATGGTCGGGTCAACAAACAAGTGTCGCGTGTTGTT |
| | | | | TAAAAATGTAGTTTGTTTAAGTTGATAAATATTACTTACTTTTACCTT |
| | | | | CAGATTATGTGGTTAGTAGACATCTTTAGAGGCAATGTGGTGGATG |
| | | | | CATCGGAATCCTCATTGACTATAGAGGTGACTTCCTCCTATTCATCA |
| | | | | AGCTTGTGTGTTTATACAAATTATTAAGCGATTTTGATGTTTATGTC |
| | | | | GTCAGTAATAGTTCTCATATGGTTAATCTAGGTTACTGGGGATCCCG |
| | | | | GGAAGATAGCTGCTGTTCAGAGGAATCTAGCTAAGTTTGGAATCAA |
| | | | | AGAACTTACAAGAACAGGAAAGGTAATTGTTTAACGACTGTTTGTT |
| | | | | TACGATGATTGGTTCTTGACTGAATTTGCTGCTGCTTGTATGTAGAT |
| | | | | TGCGCTAAGACGGGAAAAAATGGGTGAAACTGCTCCGTTTTGGAAC |
| | | | | TTCTCTGCAGCATCTTATCCAGATCTAGAAGCCCTGGGTCCTGTTGC |
| | | | | TGCCGTTTCTAAAGTGGCTGACGAGACTCCTAGTCCAACGTCAGGG |
| | | | | GTAGGT |
| 1737 | Ambrosia | gDNA | 990 | AAAATTTCTATGTTTTATGTTGTGATGAATATATGGTCTATAATGTAT |
| | trifida | Contig | | TTATGCTTTATGTTGTGGTGAATATAATCTTGATGTCATGCTTTTGTT |
| | | | | ATTCAGGGTGAGGCGCCACACGATTTCAGTATTTGTTGGTGATGAA |
| | | | | AGTGGAATGATAAATCGGATTGCAGGAGTTTTTGCAAGGAGGGGA |
| | | | | TATAATATCGAGTCCCTTGCTGTTGGTTTAAACAAGGATAAGGCTCT |
| | | | | TTTTACTATAGTTGTATCGGGAACTGAAAGAGTGTTGGAGCAAGTT |
| | | | | ATGAAACAACTTCTAAAGCTCGTTAATGTTTTAAAGGTTGGCTTTTA |
| | | | | TTCTGATGGTTGATTCATCATATTGTCTATTTTTTATACTTTACTTATA |
| | | | | TCAACCATTTTTAATAGGTTGAAGATATCTCAAAGGAGCCACAAGTA |
| | | | | GAACGTGAGTTGATGCTCATCAAGATAAATGCAGATCCAAGATACC |
| | | | | GTTTGGAGGTGTTTAACTAATTATTTTATGATCTTCATGTTTTGGTTA |
| | | | | ATTACGGTTATTTATATTATACCTAAGTACTGCAATGAACCGTTCTTA |
| | | | | TAATTGCAATGAACACATGCAATCAAATATTCAAATATAGCTAACCA |
| | | | | TTTTTAGCCTAAGGATATGCTATCTAACCATGTTCTTTTGTGATTCTA |
| | | | | ATTTTCAGGTCAAGTGGTTAGTGGACATATTTAGAGCTAGAATTGTT |
| | | | | GATATTTCAGAGCACTCTATAACTATTGAGGTGACGGGAGTCGAAC |
| | | | | TTTTTCTATAGCTTTATTTATAATTCTTCACGCATCATCTAGGAGTGA |
| | | | | GTTTGGATCTTAATGGATTGAATTGTTTATGCTATTATAGGGCCTTT |
| | | | | GCTAATTTGCATATGTTCACAACCTTATTTATTAGAATTTAGATATAA |
| | | | | GGGTTGTATACTCTGTGACTACTTGGAACAATTACAACACTAAGTAA |
| | | | | TACAACATATGCTAGGAAGGTGTTAGACCGTTACAATCGACACCCAA |
| 1738 | Ambrosia | gDNA | 984 | GGGTTTGGTGTTTATTTTTTTTAAATATCAGAGTCTAGCAGTCGGTC |
| | trifida | Contig | | ATGCAGAAGTAGAGGGGCGTTCCCGCATCACAACTGTTGTCCCTGG |
| | | | | TACAGATGAGTCAATTGCAAAGTTGGTTCAACAACTATACAAGTTG |
| | | | | ATAGATGTGCATGATGTGAGTATATATCACCGTTGGAAATTGCTTCA |
| | | | | TTTACTCGATTCACGTTATGTTTTAACTCAGATGAGTAAAGCTAAAT |
| | | | | GAAATTAACTAAAAAGGAAAAGGATCGTAAGAGTCTAAAGTCTCTT |
| | | | | GAAGTGTATTTTTAATTAATAAAACCTCTAAAATCATTTTATTAATTC |
| | | | | CATGATCATATCTGACACTTTTATTTTTGTGACAATCCAGTCTGCGCA |
| | | | | AACAATTAGCTGCATTTTGCTACTTGTACCCATTATGTTTAGTTTTTT |
| | | | | GAGATGGTTCATAGGTCATTTCTCAGATTTTGAGGTTGCTCCGCTGA |
| | | | | ATTTTAGCTAAACAAACGAAAACAAACATATTTTTGTTTGTTCAGGT |
| | | | | TGTGGATTTAACATTGATGCCATTTGCCGAACGAGAATTGATGCTG |
| | | | | ATTAAGATTGCTGTGAATTCCACTGCCCGACGCAATGTTCTTGATAT |
| | | | | TGCAAGCATATTTAGGGCTAAAGCCGTAGATGTGTCAGATCATACA |
| | | | | ATTACACTTGAGGTGAATTTTATTCACTTGCAGTTTATTTTCTGTCAA |
| | | | | GTGAAAATTCTAATGCTTATATTTTGAGTCGTTTCTAGAAAATTGCTC |
| | | | | CATTTCTTCTTTTGGGGAAAATTCCAGCTAGACCAAGGACAAGTGAT |
| | | | | GTGCTAATCTAATCCCATGCTTGTTCACAAAATAGAAACCACTAGTG |
| | | | | AGACTAACCAGAAGCCATCTTCATCTAAAGCCCATGCTTGTTGTTTG |
| | | | | AGTGTTTGATGTGAACCCAACCTTAGATAAATATGGTTCTGGGCCA |
| | | | | AGTCTCATTACTAGTGTTTAACTTACGATCATGGGGTTTTACATG |
| 1739 | Ambrosia | gDNA | 804 | TTAGGTGGAATAACAAATGTGTATAGAGGTTGAGAAAACAGAATA |
| | trifida | Contig | | ATGTAGATATCTATATCTTTAACAAACTGTGTATGTTAAAAGGACTA |
| | | | | TAATGCCCCAGTTATATGTTGATAACTAAGTGTGTGGTATGATTAAT |
| | | | | GAGCAGGGTGAAGCGTCACACGATCTCGGTGTTTGTTGGGGATGA |
| | | | | AAGTGGTATTATAAATCGAATTGCGGGGGTGTTTGCTAGACGAGGT |
| | | | | TATAATATCGAGTCGCTTGCGGTTGGTTTGAATAAGGATAAGGCTTT |
| | | | | GTTTACTATTGTTGTCTCTGGGACTGAGAAGGTGTTGCAGCAAGTT |
| | | | | GTAGAGCAACTTAACAAGCTTGTTAATGTCTTGAAGGTCTCATCTTG |
| | | | | TAATTTACGCTGCTATCGTCGTTCATTAATAACGTTGTTCCTAATGCG |
| | | | | TTACTCAGTTTTGTTTGATGTACCAGGTGGAAGATCTTTCTCGGGAT |
| | | | | CCGCAAGTAGAGCGGGAATTGATGCTTGTGAAGCTTAATGTTGATC |
| | | | | CAAGCACAAAAGCTGAGGTACGTACTTATATGATGTTTCTTGCAATT |
| | | | | TATCATTTAATTATGCGTTCCTGTTCAATGGTCGGGTCAACAAACAA |
| | | | | GTGTCGCGTGTTGTTTAAAAATGTAGTTTGTTTAAGTTGATAAATAT |
| | | | | TACTTACTTTTACCTTCAGATTATGTGGTTAGTAGACATCTTTAGAGG |
| | | | | CAATGTGGTGGATGCATCGGAATCCTCATTGACTATAGAGGTGACT |
| | | | | TCCTCCTATTCATCAAGCTTGTGTGTTTATACAAATTAAGCGATTTTG |
| | | | | ATGTTTATGT |
| 1740 | Ambrosia | gDNA | 409 | AAATTAATTTTGGGTTTTTTACACTTCTAGTTTTATTCTTTATAAAATT |
| | trifida | Contig | | TCTATGTTTTATGTTGTGATGAATATATGGTCTATAATGTATTTATGC |
| | | | | TTTATGTTGTGGTGAATTTAATCTTGATGTCATGCTTTTGTTATTCAG |
| | | | | GGTGAGGCGCCACACGATTTCCGTATTTGTTGGTGATGAAAGTGGA |
| | | | | ATGATAAATCGGATTGCAGGAGTTTTTGCAAGGAGGGGATATAATA |
| | | | | TCGAGTCCCTTGCTGTTGGTTTAAACAAGGATAAGGCTCTTTTTACT |
| | | | | ATAGTTGTATCGGGAACTGAAAGAGTGTTGGAGCAAGTTATGAAAC |
| | | | | AACTTCTAAAGCTCGTTAATGTTTTAAAGGTTGGCTTTTATTCTGATG |
| | | | | GTTGATTCATCATATTGTCTATTTTTTATAC |
| 1741 | Conyza | cDNA | 1705 | TGGCCATTACGGCCGGGGCTGCAGATTGGAACTACCACCTAAACTG |
| | canadensis | Contig | | CTTTCTTTCACTAAATCAAGTGTTGGTCGAAGGCTTGCTTTTAAGCT |
| | | | | GGTTAATGCTATCTCCGACTCCGGTAATGGAGCTCCGGCTTCACTTC |
| | | | | TTTCTACTTCTTCCCTTAATGGAGTTACTGCCCCGCCACTTTCTTCCA |
| | | | | AGGTGAAGCGCCACACTATCTCGGTGTTCGTAGGAGATGAAAGTG |
| | | | | GTATTATAAACCGAATCGCAGGAGTTTTCGCTAGAAGAGGTTATAA |
| | | | | TATCGAGTCACTTGCTGTTGGTTTAAACAAGGACAAGGCTTTGTTTA |
| | | | | CTATAGTTGTTTCTGGAACTGAAAAGGTCTTGCAACAAGTGGTGGA |
| | | | | GCAGCTCAACAAGCTTGTGAACGTCATAAAGGTGGAAGACCTTTCC |
| | | | | AAGGAACCACAGGTAGAACGGGAATTGATGCTTGTGAAGCTTAAT |
| | | | | GTAGATCCAACCACACGAGCTGAGATTATGTGGCTAGTAGACGTCT |
| | | | | TTAGAGCCAACGTTGTGGATGCATCAGAAAGCTCGTTGACTATAGA |
| | | | | GGTTACCGGGGATCCTGGGAAGATTGTTGCTGTTCAGAGAAATTTA |
| | | | | GCCAAGTTCGGAATCCAAGAGCTCACTAGAACAGGAAAGATCGCTC |
| | | | | TAAGACGGGAAAAACTGGGTGAAACTGCTCCATTTTGGAACTTCTC |
| | | | | TGCAGCATCTTACCCAGATCTAGAATCCGCAACTCCAATTGCTACTT |
| | | | | CTTCAAGTGTTACTTGCACTGTTGATGAGGATTCGACTGCAATGTCA |
| | | | | GGGGGTGATGTGTATCCTGTGGAGTACAACAATAGCTGCATAATGG |
| | | | | ATCAAGTTCTTGACGCCAATTGGGGGGTAGTCTATGATGAAGATTC |
| | | | | AACTGGTCGGCAGTCTCATACTTTAAACATTCTGGTCAATGATACTC |
| | | | | CTGGAGTTCTCAACGTGGTCAGTGGAGTTATATCCAGAAGGGGTTA |
| | | | | CAACATTCAGAGTCTGGCCGTAGGTCCAGCAGAAATGGAGGGTTTA |
| | | | | TCTCGCATTACGACTGTGATTGCTGGTACAGATGAATCTATTTACAA |
| | | | | GTTGGTTCAGCAGTTCCGCAAATTGGTGGATGTTCATGAGGTCAAA |
| | | | | GATATCACCCATCTACCATTTGCAGAACGTGAGCTAATGTTAATTAA |
| | | | | AGTTGCTGCTAGCTCTGCTGTTCGAAGGGATGTCCTAGACATCGCC |
| | | | | ACCATCTTTCGAGCCAAGCCTGTTGATGTTTCTGATCACACTCTCACA |
| | | | | CTAGAACTCACAGGAGACTTCAACAAGTTGTTTGCATTGCAAAGATT |
| | | | | GTTAGAGTCCTATGGAATTTGTGAGGTCGCAAGGACTGGTCGAGTG |
| | | | | GCATTGGTGCGAGAGTCAGGGGTCGATTCTACATATCTACGTGGGT |
| | | | | ACTCCCTTCCGTTATAATAACACCGGAAGTTATCCCTCAATTGTATGT |
| | | | | TGCATTATTGTAGCTGCAAGTGAACACAACTGTTCAGTGTCTTTTGC |
| | | | | ACTGATGGCTGCGGATGTGAGAGTATGACTTCTTGCTAGAAAAAGA |
| | | | | AAAAAGGAATGTTTAGTAGATCAATTTATGTTGTATTATGGTATGCC |
| | | | | GTGTGATGTCAAAACTGTAACAGCTTTCATTCATAGAAGTTTCATAC |
| | | | | TTAAAATGTGATGTTAAGCAAATTTATAAGTAAAAAAAAAAGAAAA |
| | | | | AAAAACAAAACATGTCGGCCGCCTCGGTCTCTA |
| 1742 | Conyza | cDNA | 498 | TTTGGGATTCGAGAAGTTGCAAGGACTGGAAAAATTGCTTTGAGAA |
| | canadensis | Contig | | GAGAAAAAATGGGCGAGGATGCTCCTTTCTGGCGTTTTTCAGCAGC |
| | | | | TTCATATCCAGACCTTGAAGAAATGAACGCAAGAACTACTCTTCAG |
| | | | | GCCAAAAAAAGTGCAGAATTTATAGAAACCGATATGTCTGTTGGGG |
| | | | | GAGATGTTTATCCAGTAGAGCAAGGAGATGACTTTCCATTTAATCA |
| | | | | AGTTCTTGATGCACACTGGGGTGTTCTTAACGAAGAAGATACAAGC |
| | | | | GGGCTTCGGTCACACACTTTATCGATGGTTGTAAATGACTCTCCCGG |
| | | | | AGTTTTAAATATAGTAACAGGAGTTTTTGCTCGTAGAGGTTACAATA |
| | | | | TTCAGAGTCTAGCAGTTGGTCATGCAGAAGTTGAAGGGCGATCCCG |
| | | | | CATCACAACTGTCGTTCCCGGTACAAATGAGTCTATCAGCAAGTTGG |
| | | | | TTCAACAACTATACAAGTTGATAGATGTTCATGAT |
| 1743 | Conyza | gDNA | 8066 | AAAGTGTAAATTAATTTAGACATGCGTTGATTTAATTACTTTTGATA |
| | canadensis | Contig | | AATTGAGAGTTGTAATTGGTCAATTGAGATTAGTTCAATTATCTTTT |
| | | | | AGTATATAGTAAGATTAAGATTAAGATAAGATAAGATTAAGATTTT |
| | | | | AGCATCCTGATTAGAAATTATGTATAACTATGTTATCTCTTCTCCGAA |
| | | | | GTTAATTTACCTAATTATTAGTATTGTTACATTACATTACCAAAGTTT |
| | | | | GATAAATTGGTAAATATAATTTGGAGTAAGGATTAAGGAATGAGCT |
| | | | | AAACACTAACGGGCCACTGGCCAAATTATTTTTTCTTAGCTTCTATAT |
| | | | | ATGGACCAAAAAGTTTACTCATTTTGGGCTACTTCAAATGAGCCACA |
| | | | | TGCAAAACCAAAAAAAAAAAAAAAACTTAAGAAAATAAAAAATAAA |
| | | | | TTGAGCCAACCTTATTTATGTCTTTTTAAATTATTATTTTTTTTTGGTT |
| | | | | TTGATTTTTTATCCCTCTCGCAAAATAGGTATAGGTATTTGACCTAAG |
| | | | | AATTTTTTAGCAAATATATCTAGAATGAAGTCGTCGTGGTATTGCTT |
| | | | | TTAAATAGATATATTAGATATTAGAAACATTTTATCGTGATATCATCT |
| | | | | TTAAATCACTACTAGAAAAATAGCCTTTAATGACACCAAAATTATGA |
| | | | | CACACGCATTTACGATGATGCGCAATTTTTGGTGTCATAAAAAAACT |
| | | | | GTCATAACTTGTAAAATCTGAAGGGTTATGACACACAATTTTTGGTG |
| | | | | TCATAAAAAAATGTAGTGTAACGCGGAATACACTTACATTTGCGTAT |
| | | | | CATCCTCAAGTGTCGTCTTATAATTTTATTCCCCATATAAAAGCTTAT |
| | | | | AATTTTTTATTTCAATCAGATCGAAGCCTATACTTTTTTTTTTCAATCA |
| | | | | GATCCAGAACCCCAAAACCCTATAATTTTTCAATCGAAGCCCCAAAA |
| | | | | TCGATCGATTAATCAATCAATTCAATAATCACAAATTAATGGTAACG |
| | | | | ATTATTCCTTTCTTTACAAATTCAACAGTATTTCATTGATTCTTAAGGT |
| | | | | TTCAATATTTTGATTATAGGCAGCACAAGATTAAATCGAAGAACTTG |
| | | | | ATAGTTTGTTTGATTACACTCGTAGTTGTTTAGAAATCATTCCCCTCG |
| | | | | ATGACGGTTCGTATATATACAATTAATAGTTTATAGATTTGTTATTAT |
| | | | | ATTAATCAATTGAAAATAACTAAGGTTTCGTTATTATATTTATTTTCC |
| | | | | ATTAATTAGTAAAAATTCAGTGCGATGAATTTTTGAAATATGCGATT |
| | | | | AGATCTGAGTTTGCTTTTTTCTAGACAAGCAGGCTTCGACACACACA |
| | | | | CTTTATCGATGGTTATAAATGACTCTCCTGGAGTTTTAAATATAGTA |
| | | | | ACAAGAGTTTTTGCTCGTAGAGGTTACAATATTCAGGTATGTTTTTT |
| | | | | TTGTATCTGGGATATTTCATTAATTTGCTTCTTGAACATATGGAATTA |
| | | | | CCAGAGTTTTAAGTAGTTTGGTGTTTGCATCTTTGATTCAGAGTCTG |
| | | | | TCAGTTGGTCATGCAGAAGTTGAAGGGCGATCCCGCATCAAAACTG |
| | | | | TCGTTCCGGGTACAAATGAGTCAACCAACAAGTTGGTTCAACAAAT |
| | | | | ATACAAGTTCTATCGCCATTGACCTGTTGGAGATCCATAAGAAAGA |
| | | | | GATGGATCTAATTTCTTCAAATATAAGATTGGGAGAGAAAGGAGCA |
| | | | | TTTTCATGGACCACTTTATTATATGTTTCTTCCACAAGCACCATATTG |
| | | | | TAATTTGAACGATTGCATTTATCATTTTCTTCCATTTTTTTGTCACCAA |
| | | | | GTAATGTGTTATGTAAAAGATGCAGGTCTCGTACCTGAAAGGCATA |
| | | | | TATCGGACTTATTTTACACCATCTTCCAACCTTGCTCCAAACATCTAA |
| | | | | AACTAATGGGCAGCCGGTAAACAAGTGGTCACTTGATTCTTCATTCA |
| | | | | CATTGCAAAACGGGCATAGTAACGTGGTTGGAGAAATACCACGTTT |
| | | | | TGACAGCTGTAAGAGTGTTGGTAAGCGATCTAATCCTGCCCGCCAG |
| | | | | TTCATGATATTCACCTTTTTTTTGGATCCATTTGTTCCAACAAAAGTC |
| | | | | AACACCCGAGACATTATTATCTACGGCGTCAAGTTTCTCCCTTACCTC |
| | | | | AACCACTATATATGAATCAGATTCAAATGTTGCAAGTATGTCCACCC |
| | | | | CTAGTTTATCAAAATCCTGCTTAAGTTTGTGTACATTTCTCCAAAGAC |
| | | | | CTCCGATTCTATTTTTGAGTGGAACATCGAGCACGTTACCTGCTTCA |
| | | | | CCATGAATAGCAACCATCGTCTTTCTCCATAACCTATCTGGTTCAACA |
| | | | | TGAAAACGAAACCACCAACGTGCTAGCAAAGCCATATTTGCAACCT |
| | | | | TTAAAGAACCAATACCAAGGCCACCCCTATCCTTCTGTCTAACGACC |
| | | | | TCATTCCATGCAACCCAACTAATTTTTTTATGCTCTTCATTTTGAGCCC |
| | | | | AGAAAAACCTTCTCCACAGCCTCTCCAATTGATCATTTATTTTCATAG |
| | | | | GAGCTCAAAACAATGAAAAATAGTGTATGGTAGACTTGAGAGAAC |
| | | | | AGATTGAATTAACGTGACTCTTCCTCCCACCGATAAATTTTTGGCCTT |
| | | | | CCAAGAGGATAATCTTTTATTAAAAACATCAACTACTGGTTGCCAAT |
| | | | | GACAACATCGATTCATACTAACCCCTAGAGGAAAGACCAGATACTC |
| | | | | CAATGGAAAAGACCCTTGCTTGAAATGAAAATGCTCAGCTACTTGT |
| | | | | GCTACTGATTCAGTTTGAGTCCCAATCCCGATGATTGTTGATTTATT |
| | | | | AACATTCATTTTTAACCCAGAAATAATGTAGAAACCTCTGATGATTC |
| | | | | TGACTAATTTCAAAAAGTTTGAGATAGACCAGGAGCCCAATAGAAG |
| | | | | TACATCATCGGCATATAATAGGTGACTAATAATAGGGCCTTCATTGG |
| | | | | CAACTAAATCCCGTTGATCAGGTTTTTTGAGATTTCATCATTCAGAA |
| | | | | AACAAGTCAAAGGTTCCATGGCTAAAGTAAACATTACTGATGGTTT |
| | | | | GACAAGTCACCACCCTCCAAGGTCCAGTTCTTATAACTTGCGTAATT |
| | | | | CTCTTAATAGTTTGACAATATGTTATATTGTGAAATTCTCTTAATAGT |
| | | | | TTAACTAATAGGAGACGTAAATATCATATTACACCACCATTTTGTAG |
| | | | | CTCTTGAGCTTGTTCCTAGTTCACTTTCCAGCTCTTCAGGTTGCTTTT |
| | | | | GTAATTCATTTGACTGATGGTTGTTCTTCTAGTTAGGTGATAGATAG |
| | | | | GACCCAAAATAGGGTATAAGAATTGCCAAAGGATTATAAATAAAGA |
| | | | | TTTCACCTGATATGTTTATAATTTACAGTGATTGTATTATGTTTGTAC |
| | | | | TAATTATGATGTCTTGGGCTGAAATAGATAGGACATAGGCGTCGGG |
| | | | | AGTTGCAAAGGGTAAACCGAGGATTGCAGGGAGGAAAACCCTTGC |
| | | | | TGATATTAACAATATTCCACAGAGAGGTACTGCTTCAGGTGAAGTT |
| | | | | AACAAGTCACAGCCAAGTTCAGACGCTGCAAGACATATTATCGAGC |
| | | | | GACTTCAAAAGGTACATCTTTTTGGTTGGTCATCTTAAAGCTAAAAC |
| | | | | ATGTCACAGTTTTGTTAACATGATTCAAGTAAATATCATTTTTTTGAT |
| | | | | ACATAATATAGATAGATAGATATGTTGATTCAGTAATTGAAGTTGCT |
| | | | | CATGTATGTTATCCAGAAAAATGCAGGATTTCTGAAGCTTTTGATGG |
| | | | | ATAAAAAGTATCCATTGATTTTCTTTTACATTTCATGTTGCTATGAGA |
| | | | | ATCTGAAAACTTTAATTTGGCCTTATAAGTTAACTAATGCTTTTGCAG |
| | | | | TAAACTAATTGAATTAAGTGGAGTCGAGGTGTAAAAAGTGAGGGC |
| | | | | CACTTTGCAGATAGTGAAACAACCGAATTTGCAACTTGCTCAGTCAA |
| | | | | ACAGCCAGATTTAAGCAGTTAGTTTACTTGGCGTAGTTAATGATTGA |
| | | | | TATACTATTGAGGCATTCATTTGAATATGACTAGTATGTGATAATGT |
| | | | | TTCATTTTATGCTGCAGGAACTAAATTTAGTCAGGGAAATGGTAAGT |
| | | | | AGTCCGGAAGATGCTAGGCGTTTTGTCGTCCTCTTTGACATCTAAGT |
| | | | | TCTTCCATTGGTCATATTCATACCCCATGGTTTTCTTGTTTTATCCAGC |
| | | | | AAAATTCTTTAAAGCATGAGCTTGGTTGCAAAAGCGCCTTGATTATT |
| | | | | GCAAAAAATCTCGAGCTGGAGGTTAGTTTAGTGTAATCTTCTTCATC |
| | | | | GGTAGCACACTTGCATGCCCCTTGGTGTATTTCTCTTTATTTAATGCT |
| | | | | TGCTGTTTGAGTAAGCCTGGCAAAATGGGAGGGTCGGGCGAGTTT |
| | | | | GGGTAACGGGTCAAAGCGGGTGCGGGTCCAAACGGGTCATTTCAT |
| | | | | AAATGCGTGTCAAACGGGTGCGGGTCGGGTGCGTGTCAACCCGCA |
| | | | | TTTTTGGTTTTTTTTTAATGGTATTTTAACATGTTTATAATAAAGTTAC |
| | | | | AACTGCTTAAGCTTTTCCTATCAATCTACCATTTTTTTAGCTGTTAACT |
| | | | | CGTGACTTGTGTGTTGACTTGTTTTGTGAATTTTTGATCGCGACTTGT |
| | | | | ATCGTAAGAGTTATAAAATGAAAATTACATGACAAAATTATATAATG |
| | | | | TGTAAAAACATACATAAATTGATATTTTTAACAAAAATATATGATGC |
| | | | | ATGTGTAAAAATTACATGGAAAAAATATTACTTAGATTTATTTTTAA |
| | | | | ATTTAATATATATTGGATCAAAGAAATGAAAGAATGCATCAATGAA |
| | | | | AAAATGACAAAAATAAATAATAATAATAATTATATTGATAATAATAA |
| | | | | TTATTATAATAATATATATTTAAGTGAATCTGATTAAAAGTTCTTTTC |
| | | | | GTTGATGTGAGAATTGAAAATAATTAATTAAATAAGGGGTGAAATA |
| | | | | ATAATTCATCTTAGTTAATAGATTGAACATCCATTAACAAGTTGAGT |
| | | | | TTACTCCAAATTGAAGGTGGGTAGGTCGTAGGTGTACTAGCGTACA |
| | | | | CTCTAACGGCAGTATGTACGACATTAACATAAATATATGAGTGATCA |
| | | | | CTCAAACTTTTGAAGACCTGCTCGACCCGCAAAGCTATATTGATAAT |
| | | | | TTAAGAGTTAAAAATGAGACCCGCTTCTATCCTTTTTGTAAGATCCA |
| | | | | GTTGTACCCAATAAACAAAATAAATTACCCAAACCTAATCTAATGAA |
| | | | | ATTGGGTATGGATTGCCAGGGCTATGTTTGAGTGTATGTTATCTCA |
| | | | | GGGAAAAGCGAAAACCAAGATATGTCAAATAAATGAAAATATTGTA |
| | | | | AGTACATAAACCTCAATAGTATTTTAGTTTTGTTCAAAATTTGTTGGT |
| | | | | TCAAGTTTTGTCTGCTACAATATAAGATGAAAATTTATGTTTCTATCT |
| | | | | TGTAGACAGGTAATGTAACTGAGCCAGAGGCGAAAAAAGTGATCC |
| | | | | AAGTAGCAGAAAGTGACAATGACAGAAGTAGAACGCAAAAATCTA |
| | | | | AATGTCAGAAATCTAAAACATGTGAATGATGATTTGGATGAAATTT |
| | | | | GTGAAGAATGGACAAAATATGTGACAAACTTCATTTTCCGGTCTTG |
| | | | | AATTCAATATAACAGTGGTTGTATGGATGTGATGAATTTTTATGGTT |
| | | | | AGTTTTAGAATTTTTAAATAACTTGTGGTTGTATGAAATACATTGTTT |
| | | | | AGATATATATAAAATGCGTTTTTTTGCTATTTGTGTATTTATTTGTAT |
| | | | | TATGAGATTAACTGTTATTTAATGTGTAGAGATATTAATAATTTTATA |
| | | | | AAAATATTTTTTTTTATAAAAAATTTGAACTATGACACGCAAAAAAG |
| | | | | GCGACATAAATTAGTGTCATTAAAGTGTGTCGTAAAAGAGTGTCAT |
| | | | | AAAAGCGTGTCATAAATTTATGACGTGCCAAATGCGTGTCATAAAG |
| | | | | ATTTATGACGGGTCGATTTATGACACCAAAAATCGTGTCATCTGACC |
| | | | | CCTTTTATGACACCAAATCGGTGTCGTTAAAGGTGTTTTTTTTCTAGT |
| | | | | ATCACTTTTAAATAGATATATTAGATATTAGAAACATTTTATCGTGAT |
| | | | | ATTGTCTTTAAATAATTTAATGACATGATAAACTTTTGATCAAACATA |
| | | | | TTTATGATAGAGTGATCTTCATCTTTCTTTTGAATTCACCAGTCATTC |
| | | | | GATGGGTTTCAAGGGGATCCTCGACTTTTCCACCTTTTTTTATCCTAA |
| | | | | ATGTTTGTCTACTCAAGAACAAATCAAAGACCAACTATCTATATCGG |
| | | | | GAGTAGCAATCCTCTATAGGAAAGGCCTTACCGTTTGCATACCCTAA |
| | | | | AGTCGTCGTTACGCACCAGTAGTCGATCTGAGTGTTATCGTCTACTC |
| | | | | TAGAAGGTAATCGACCAAATATATTTCTTTATGAAGAAAACATTTAC |
| | | | | GACAATCAAGTCGTTAGTCGTATGCAGTAACAAACTCCAATAGTGT |
| | | | | GCGTTTTGTTTTCATTTTCCTCTCTTAACCATATCTTAAGTTAAAGAA |
| | | | | AAATTATTAATCTTCTTAAAGCTTTTCCGAAAATCTCTAAAATTTGAC |
| | | | | ATGTAGATTTCATTAATTTTATTACTTAATCTCATTTTCAGATTATATT |
| | | | | ATTATCATAATCTTATCTCTACTACCTAATAAAATAAATCACACCCCC |
| | | | | CACAATAAATGTTTTCTGCCTTTAAAATTACTTATTTACCCTTGGACT |
| | | | | TACCTTTTTTATTTTTTTCTTTTAATATTTAATATTAATACAAAAAACT |
| | | | | GATTTCGACAAATAAAGTGGTCACCCATGTTTCTTTAGTATCTACGG |
| | | | | TTTAAGATTAATGTTGGTGGATCAATTATTTTTATTAAAGTTACAATT |
| | | | | TTCAATTTTAATAATTAAGATGTCCTTTATCTTTCATTTGGTAAGATT |
| | | | | AATGGATAAGGAAAAGTTTTATTTATAAAACATCTGGGCATAAAAT |
| | | | | ATTCTAGACCGCCTTCCCCACCACTGTCGCCGCATTCAGGGACGGTT |
| | | | | TTAGCATGGGGGCATTGGGGGCAAATGCCCCCATTCTAATTTTGGT |
| | | | | ACAATGTAATTTTTTTTATATAAATTCTAAAAAACTTAGTCTAAACCG |
| | | | | AGATTACATATAAATGTTTCTTTCTTTGTCATAAGTCTCTTTTTTGGA |
| | | | | TGTATATATATAGTATTACCTTGTCAAACTCGACAATAATACTGTGT |
| | | | | ATTTAGTTCCCCGTCTTCATCATGATCATCATCTTCTTCATTTCAAAG |
| | | | | GCTCATTTTCGAAGTATTTAGATGTAGAGAGTGATGAAGTGTAAGG |
| | | | | GGTTTGTGTTTATGATTCAGAGTGTTTGAATGTAAAATTTCAAAGAT |
| | | | | TTTGATGGTGATGGTGGTTGTTGCGGTGGTGGATCTCGTGGTGGTT |
| | | | | GTTGTGGTTGTTTCACATGTTGTGAAGGGAGGTATATTTGATTGTTG |
| | | | | AATTTACAGATAAACTGATAAAGTGAGATTGTATATGGAAGACTAA |
| | | | | AATCATTACTCGTATTTACTAATTTACCATCTATCTAGACTTGTCTTTA |
| | | | | TCAAATGGTGAAGTGTATATTGGAAAATTCCATCAATATTTTATTAG |
| | | | | TTACACCACCTACACACATTTTATAGATTCAAATATTATTGTAATTTT |
| | | | | TTTAATGTAATATTCCGTATATTTATATATATAAGTTTGATTTGATTT |
| | | | | GTGAAAAATTAATGTAGGTAAGAGTACAATATTTGAAATAAAATTG |
| | | | | TCTACGCGTGAAACAAAATTCTTTTAGGGTCCATTTTCTATCCTCGA |
| | | | | GACGGGTTTTAAAAAATTTTTATTTTATCTTTTTAGAAACGGTTTTAA |
| | | | | GAAATATAATAAAGACTCTTAAATTTGCCCCTTCTTGGAAAAAACTC |
| | | | | TGGCTCCGTCACTGACTGCATTGCGCGGGTACCATACTCGTAATTAA |
| | | | | AGATGATTTTTAGGTTGATTTGTTAGCTGTTTTTTTAAGTTAATATAC |
| | | | | TTATAGCTTTAGTTTCGTCGTAGCGAAAATGTGTTGCTTGTTCCACC |
| | | | | CAAAGCTATTTGCAAGTGGCTGGCTCATGTATGTGTTTCGGTATGTG |
| | | | | GGTGTATTTTTGATAATACTGAAATGGTACCTCACGTTTGTGCCATA |
| | | | | TTACTGGTTTTATACATTTTCGTTTGAAATTACGCTGATCATACCCAA |
| | | | | CGTATGC |
| 1744 | Conyza | gDNA | 7484 | TTTGCACAATGTAGCAGTGGTGGTGGTAATGATAGCGGCAGTAGG |
| | canadensis | Contig | | GACAATGATGGAAGCGACGGTGGTGGTAAATGTAAAAGTATTTGA |
| | | | | TGTTAAATGTGGTATTATAGTTATTTTAAGTGTTGGAGGATCTATAC |
| | | | | CTTAAATTATTACATTAAGGATATTATAGGAGTATATTAGATCGAGA |
| | | | | TGTTTAAATTAGTAAATAAAGAAGAAAAATATTTTTGATTTTTTAAA |
| | | | | TGTAGAAAGTTTAAGGAAAAAGAATTTATTTTATTAGATAATATAGA |
| | | | | TTATAACTAGTTGAATCGTTTTATAAAACCCGACTGCTTTGATTAAA |
| | | | | ATATCATTGGTTATAACTTTTAAACATAGGCCTCGTGTCACAATCCA |
| | | | | GCTTAAAGTAAATTTTGACAACCTTAAATCAAAAGCTCCTCAATATA |
| | | | | TAATATAACCAAAAAAACTCAACAAATAAATAAATAGATTAATATAT |
| | | | | ATACCTCAACAATGGCAGCCGCCGCCGTGACTACTTACTCTGCCACC |
| | | | | GCATTTCGTACTCGAACACCACCACCACCACCACCACCGTCTGTCAT |
| | | | | CCCCAATCAACTATCATATGCCTCCAAAAAACCCAACAGCAAATTTG |
| | | | | ACCTCAAAAAACTCTCTGTCAAAGCCTCCACCACTGGCTCTGTTCCC |
| | | | | GCCCCTGTTGACTCACCTTCATCCAATTCGTCTAGACCCACGTCAGC |
| | | | | CCCACCTCCACTCCCCCTTTTTTTATTATTATTAATTGTTTAGATTCAT |
| | | | | TTTTGCTAATCATATATATATATAGATTTCTAGTCATATATCTATGTTT |
| | | | | AGTCTTGTTATTTTATGCTGCATTTCGATGGGGACAATGGTAAAAAC |
| | | | | AATATTTACATTGGTAATGTGTGTGTATAGTTGTAAAATTTGCATGT |
| | | | | TTGTTTTGTTTGTGTTTTCAGTCATTATGCAACTTAGTATTCTTAAATT |
| | | | | TATGTTTTTTTCTTTTCAAATGAGATTTTGTTACGGATTGATCAGTGT |
| | | | | AGATGAGTGAAGTGTTAGCCTAAGGGAATAGGGATAGGGAATCTC |
| | | | | GATGTATCGGTTGCAATAGTTATTCTTCTAGTGACCCACAAAATAAT |
| | | | | TTGAAGAATGTTTGTCTAGTGGGGCGTATGGGGTTACCTTGCTATC |
| | | | | GAGGTCTAGGGTGAGAATCAAACTATAAGTATAGAAGGTTAAGAT |
| | | | | AGAGCTTAAGCCTTAAGGTGTGAGTGAGTGAAGAATAAAGCATATT |
| | | | | TTGAAGATGATGGTGATCTTTGGTTGAATTGTTGGATATGTAGTCAT |
| | | | | AACTAGTGGGGTTGCTGCCTGAGCCTGCATCGTGTGTCGGCTACTA |
| | | | | GTATGGATTCTGGGACGACTACGGATTGGGCCCCAGATACACAGTA |
| | | | | TTCCCTTTGTCAGGATTACACTTGGAGCACAATGCATAGTCTAGGTT |
| | | | | AATGATGACAGAGTTGCCACCTACTCTTGAAATCTATAGTACACTTC |
| | | | | AAGTTGACGTTATATCAGAGAGCTACTTAGGGTGTTCTATGTTATTT |
| | | | | AACCTCTCTTGTTGATATTCTCTGGGGTGTTTTTTGGGTATTTGATTG |
| | | | | CTCTTGGATTTCGTTGATTCCCTTTTAAGTGATCCTGGCTTTTGATTT |
| | | | | CCCCTATGAGGTCGTTGATACCCACTGAAGCTTTTTTGGTTATTGTC |
| | | | | CCATATTAAGTTTTTTTGGGGGCTTATTGGTGGTTTGATATTTGATC |
| | | | | ACATGGTATTGTATTTTTTTTCTTCAAATATTGAAGTTATGAGTGTTG |
| | | | | TTTCTACCATGTGATAAATATCTAAGTCTATGCTTAGTAACTACATTT |
| | | | | GATACTTAAGTTAGAACTGGATATTGAACTTTTACTAACCGATATGG |
| | | | | TTAACTAAACACCATAGGCATTGATATCTGATGCCATTTAATTGCGT |
| | | | | GTAGTTATTTAAATTATTTGCTTTCCTTATTTATACTTTGTCATTTGCC |
| | | | | TTCATATATTCTTATGAAAGGTTTACATATTAATTTCTCGATATATCTT |
| | | | | TATAAATAAAGTTTAATGTAACACAGGGTGAGGCGCCACACTATTT |
| | | | | CAGTATTTGTTGGTGATGAGAGTGGAATGATAAATCGGATTGCAGG |
| | | | | AGTTTTCGCAAGGAGGGGATATAATATCGAGTCTCTTGCTGTTGGT |
| | | | | TTAAACAAGGACAAAGCTCTTTTCACTATAGTTGTATCTGGAACCGA |
| | | | | AAGGGTGTTGCAGCAAGTTATGAAACAGCTTCTAAAGCTTGTTAAT |
| | | | | GTTTTGAAGGTTGACTTCTGTTTCAAGTTTAAACCATCGATCCATTAT |
| | | | | GGTTATTTTCTTTTTTAAGTTTCTCGAAGTTGACTACCATGAACAGGT |
| | | | | CGAAGATATCTCAAAGGAGCCACAAGTAGAACGTGAGTTGATGCTT |
| | | | | ATCAAGATCAATGCAGATCCAAGTTACCGTATGGAGGTAATTATGC |
| | | | | AATGTTAATCATGTTTGGGTTTTTGGCTGTTATTCATAACATACTACA |
| | | | | TTATTCTGATTCATGGAGACGAACATATTTCCATGACGGGGGTGTTT |
| | | | | TAGATATGCCATTTAAATTGTTCATATGATTAGTGTGACCTTTAGTAC |
| | | | | TGATAACATAAGTGTTTGGATAAACAGATTTTGCTTATGACTGTATT |
| | | | | ATGATTATCTAGTGGACAAGTAAAATGTGTGAGAATATGTTATCTCA |
| | | | | CCATATTCTTATGGTTTTGATTTTCAGGTTAAGTGGTTAGTGGACAT |
| | | | | CTTTAGAGCTAGAATCGTTGATATCTCACAGGACTCGCTAACAATCG |
| | | | | AGGTGATGGAAGTTGAAATTTTACTTTAACCTTTAAAGTGTTTACTG |
| | | | | TTTTTTCAGGCACAACTGATCTGGACTCAGTTTTGGGTCTTTATGTAT |
| | | | | TGTAATTTACAAAAGTATAATGCTCTATAGAGGACCTGTGTTAGTTT |
| | | | | GTAATTTTTCAATGACCTTTTTGATAAATATGAAATTCGTACACACTT |
| | | | | TGACTCTTTGGAATTTAGGTAACTGGTGACCCAGGGAAAATGGTTG |
| | | | | CAGTGCAAAGAAACCTGAGTAAATTTGGGATTCGAGAAGTTGCAA |
| | | | | GGACTGGAAAAGTAAGTTATTATTAAGTCTCTATTTTTTCCTATTCTT |
| | | | | CTTTCATATTGATTGTTAAATTCTGTATGCCTTAGATTGCTTTGAGAA |
| | | | | GAGAAAAAATGGGCGAGGATGCTCCTTTCTGGCGTTTTTCAGCAGC |
| | | | | TTCATATCCAGACCTTGAAGAAATGAACGCAAGAACTACTCTTCAG |
| | | | | GCCAAAAAAAGTGCAGAATTTATAGAAACCGATATGTCTGTTGGGG |
| | | | | TAAGTTGCTTTCTCTTTTTGACTGACGCTAACCTGGGTTGTAGAGGT |
| | | | | TGCAAATTAGTTGGGAAATTGGGTCAAAGCGGAATTTTTTTTTGCG |
| | | | | GATCGGCTAATGTTGACCTGAATTGGTGTTTGTCCCAAGTTCAGTTT |
| | | | | GATCTTTTATACATAATTAGTTTGTAAAACATAACTAAACTTTTTATA |
| | | | | TATGTAAATGCAACTATACGGCATTGCTTTTCAACAAAATGATATAG |
| | | | | GAGGCACCATTGAAAAGAAAGATTTTAGTGGTTTTATGCTTAAAAC |
| | | | | TACATTTGGCAACTTTCAGCCGAAGCTCTTTGTTTTTAAACTTATTTG |
| | | | | CTTTACTCGTTTGACCCGTTATAATATAAATTAGTCTGGTTCGACGAT |
| | | | | TATCTATCTTGCACGATGTAGTTTAGACTTGAATACTTCATACACAG |
| | | | | ATGGTGAATGAGGTGGTATTTCTTATCTGTATTAAATTATATTTGTG |
| | | | | AAGGGAGATGTTTATCCAGTAGAGCAAGGAGATGACTTTCCATTTA |
| | | | | ATCAAGTTCTTGATGCACACTGGGGTGTTCTTAACGAAGAAGATGT |
| | | | | AAGAACTTGATATCACTTCTCATATTTCACAAATGTCACTGAGGTGC |
| | | | | ATTGAAGTATCAGTAATTTTTAGTTTGATGTTTCTAGACAAGCGGGC |
| | | | | TTCGGTCACACACTTTATCGATGGTTGTAAATGACTCTCCCGGAGTT |
| | | | | TTAAATATAGTAACAGGAGTTTTTGCTCGTAGAGGTTACAATATTCA |
| | | | | GGTATGTTTTTTGTATTCCGGATATTTCATTAATTTGCTTCCTGAACA |
| | | | | TATGGAAGTACCAGAGGTTCAAGTAGTTTGGTGTTTGCATTTTTGAT |
| | | | | TCAGAGTCTAGCAGTTGGTCATGCAGAAGTTGAAGGGCGATCCCGC |
| | | | | ATCACAACTGTCGTTCCCGGTACAAATGAGTCTATCAGCAAGTTGGT |
| | | | | TCAACAACTATACAAGTTGATAGATGTTCATGATGTGAGTATATATT |
| | | | | GTAGTTGGAAAATGCTTCATATGTTAAGTTTATTATGAATGAGCAGT |
| | | | | ACTACTAGTCTCATTTTCCGCCCTCCAAGGTCCATTTGTAGTTGTTTA |
| | | | | CGACCCAGTTCTTATGGAAAGGTAGATTTGGGCTGTGCTGGTAAAA |
| | | | | TTGAAAGGTTTAACTAATAAGGAAATGGGTCAAGTGGTTCGAACAG |
| | | | | GTTGAAAGTTTCCCAGAGAGTGATACTCGTATAATTATTGTAATTCT |
| | | | | CTTGATCGCTTTTATCACCAGTCTGTAAAAAACGAAAAAGTTTGACA |
| | | | | AGATGTGTTTCACTTCAAATAGGTTATAGAAAAATAGATTTATTAAA |
| | | | | ATAATGTAATTTTTGTTATTTTATTTGACCCAAAAGGACTTTGAATAG |
| | | | | TACCAAAAGGACTCTTCATTGACCCAGTACCCACCTGTCTGTTTTGTC |
| | | | | ACCCCTACCCATTTGGTTGCTATTGATACTACTGAGGAGATATAATT |
| | | | | ATTCTATTACACCACCATTTTGTAGCTCTTGATCTGGTTTCTAGTTCA |
| | | | | CATTCCAGCTCTTGAGGCTGCTTTTCTAATTCATTTGACTGATACTTG |
| | | | | TTTTTCTGTTTAGGTGATAGACCTAACATCCGTGCCATTTGCTGAGC |
| | | | | GAGAGTTAATGCTGATTAAAGTTGCCGTCAATTCCACAGCTCGACG |
| | | | | CAGTGTTCTTGATATTGCAAGCATATTTAGAGCTAAAGCCGTAGATG |
| | | | | TATCAGATCACACAATTACACTCGAGGTGAAATTTAAATATAATTCA |
| | | | | CTTGCATATTACACGTGTTGACTGAAATTTCATGATCCTACTATTGAA |
| | | | | CGTTACAAAATTTCATGATCCTTACCTTTATTTTCACAGTTTTTCTGTT |
| | | | | TTTCTTTCCCCGTTGGGTTGTTTCAGCAATAAATTGTTTTTCTTGTATT |
| | | | | TTCCAGGTCACTGGAGATGTAAATAAGATGGTAGCATTACAGAGAC |
| | | | | TGTTAGAGCCATGTGGAATTTGCGAGGTTTGTTTGTGAAATCTGTTA |
| | | | | TTTATAATATTTCTATTTGAACATGTCACCTTCCAGTTTAAAACCCAC |
| | | | | AGCTTGGTTTGCTCATTTGGAACCATGAACAATCTCATTGTTCGTGA |
| | | | | CCAAACTACAGTTCTAGAACTGAACTAGAGTGGTCAGTCTTTTTGTG |
| | | | | TTGCAGTCCTATTTACTTAATCCTTGATCATTATTTGTAGGTTGCAAG |
| | | | | AACAGGGAGGGTGGCACTGTCTCGTGAGTCTGGTGTTGATTCATCT |
| | | | | TACCTTCGTGGCTATTCCTATCCCGTTTGATTCAGTCATTTAGAGTGT |
| | | | | CTTTTTGTTTTTGGTTGCTCGGAGTATAGAATTATATATTTTCAATGA |
| | | | | TTGAATATCTACAAGTCGTTTTAGCATGTATGTTTTAATAAAAGCTG |
| | | | | CTGTTTTGAATGAGGGTTTGGTATGAACCCAATTTGAAAGATTTTGT |
| | | | | TTTTTCTTTAAATAGGCGCCTAAGCTCAACAAGGGCACATGGTTAGA |
| | | | | TTGGTTGAACTAGTTTTTTAGGGAAACATGTTCCTCATCAAGTTCTA |
| | | | | ATTTGCAAGATTGACCGAACCCATGTCCCTGCCATTTTTTCCGTTCAT |
| | | | | GTCTTGAGCCGAAGTTATAACTCAGGTTTAAGCACACCCTCATTAAA |
| | | | | ACTCTTCTAATAAATTGAATGGAATTTTTAGTCCTCAAATATCCTCGC |
| | | | | GAGATTTTAGCTCGTGATTTATGCTGCCCACAGAGAATATGTGGTTT |
| | | | | TTGATGACCCTATTTTTCAGTTAATTTCCAAACATCATCCACCAATTC |
| | | | | CACTCTTTTTGGGAGTCAAAATTTATTGACAAAATTAGAAAGAGAG |
| | | | | AAACAACCAAAAATCATAGAGGAATTAAAAATAAAAATATGAAAAA |
| | | | | AGATGATCTAACATGAGAATGGACATCGAACATGGAATATAATGTT |
| | | | | AACAAATATCCACAAAGACTGAATTAATCAGAGAATGTGGCTTCAG |
| | | | | AAAAGCGGAAGTAGTTTGCAGGGTGGTGATCGAATGCAGAGGAAG |
| | | | | GGAACTGGAACCGCCATGGTTGCGGTGGCTATAGACAAGGACAAA |
| | | | | TACAGCCAGCAAGCGCTTAAATGGTCCATTGAACATCTTCTTACCCG |
| | | | | TGGACAAACCGTTGTCCTCATTCATGTCATCCGGAAAACCCCTCCTA |
| | | | | CAGGCAATATTTGTATTCTGTCAAACGATTCAGATATTAACATTGTTT |
| | | | | ATAACAACTAATTGAAACAGAGAGAGAGAGAGAGAGAGAGAGAG |
| | | | | AGAGAGAACCTTATAATCCCATATCAATTTCAACTATTTGACCAATA |
| | | | | TATAACCCCTAACACGATTGTTGAGTCACATAATCCTTGAAACAAGA |
| | | | | TAAAACAATTAGACTGCGTTAAGTTACAGAAAACGTTTTCTAATTTT |
| | | | | CCACTTAGAATTCATAAGAAAATGGAAGGGGTTTTTTAGTTCTAGA |
| | | | | AACTTAAACTTCTGAAAATGCGTTTAGTTGTAAGTGGAAAACGTAA |
| | | | | GGAGTTTTTCATTTTTAAATAACAGATGTGCCAATATGAATGTAGGG |
| | | | | GGAGGGATTGATGCATCTGCTGCAAACAAGCAACAAACTGAGAAG |
| | | | | CAAACAAGAGATTTGTTCCTCACGTTCCATTGCTTCTGTACGCGTAA |
| | | | | AGAAGTACGTGTTTTACTACTATCTGTCTTGTTGGGTATCTTTTGCAT |
| | | | | GGTTTTGCTAAAATTGTTGCACTGCAGATACAGTGTTACGATGTTAT |
| | | | | ACTTGAAGATGCAAATATAGCAAAAGCACTCACGGAATATGCATCT |
| | | | | TATGCTGCCATAGAATATTTGGTCCTTGGTGCCTCATCACGGCATGG |
| | | | | TTTCATCAGGTCATTTATTCAAATGAAATTTTTGCAAAACCTTTAAAT |
| | | | | GTTTTAACGATTATCACCTTTGAGTTAATATTGTAAGCATTTCTATAA |
| | | | | TGATAGCTGAATGCTTGGACTAATGAGTAACGATTAAAACATTTATA |
| | | | | AACAGATTTCGGAGTTCTGATGTGCCAAGCCAAGTAATGAAATCGA |
| | | | | TACCAGATTTCTGCACTGTTTATGTCATCTCAAAAGGAAAGATATCC |
| | | | | TCAGCAAAGAAATCTTCACGAACAGTCCCGTTTCCATCTCCTATACG |
| | | | | TGAGAAAATAGAAGAACAATCTAACACCAACTTTGAAGCAAGTGTA |
| | | | | CGCCGCAAGAATAGTTTTAACATTAAAAGTCAGTCATTTATTTTCAG |
| | | | | TTTAAATACAATACATTCCCAAAAGTTATCTTGTTTTTCATGACTCAA |
| | | | | AGAACTTGTGAACAGAACCAGAAATCGCGCCAGAGAAGCCACTACT |
| | | | | TCCGGCACCAGAAGA |
| 1745 | Conyza | gDNA | 7382 | CTATACCTTAAATTATTACATTAAGGGTATTATAGGAGTATATTAGA |
| | canadensis | Contig | | TCGAGATGTTTAAATTAGTAAATAAAGAAGAAAAATATTTTTGATTT |
| | | | | TTTAAATGTAGAAAGTTTAAGGAAAAAGAATTTATTTTATTAGATAA |
| | | | | TATAGATTATAACTAGTTGAATCGTTTTATAAAACCCGACTGCTTTG |
| | | | | ATTAAAATATCATTGGTTATAACTTTTAAACATAGGCCTCGTGTCAC |
| | | | | AATCCAGCTTAAAGTAAATTTTGACAACCTTAAATCAAAAGCTCCTC |
| | | | | AATATATAATATAACCAAAAAAACTCAACAAATAAATAAATAGATTA |
| | | | | ATATATATACCTCAACAATGGCAGCCGCCGCCGTGACTACTTACTCT |
| | | | | GCCACCGCATTTCGTACTCGAACACCACCACCACCACCACCGTCTGC |
| | | | | ATCCCCAATCAACTATCATATGCCTCAAATGGCATACCTTGTACCTTC |
| | | | | ACCACCATTTCTTCAAAACCCAACAGCAAATTTGACCTCAAAAAACT |
| | | | | CTCTGTCAAAGCCTCCACCACTGGCTCTGTTCCCGCCCCTGTTGACTC |
| | | | | ACCTTCATCCAATTCGTCTAGACCCACGTCAGCCCCACCTCCACTCCC |
| | | | | CCTTTTTTTATTATTATTAATTGTTTAGATTCATTTTTGCTAATCATAT |
| | | | | ATATATATAGATTTCTAGTCATATATCTATGTTTAGTCTTGTTATTTTA |
| | | | | TGCTGCATTTCGATGGGGACAATGGTAAAAACAATATTTACATTGG |
| | | | | TAATGTGTGTGTATAGTTGTAACATTTGCATGTTTGTTTTGTTTGTGT |
| | | | | TTTCAGTCATTATGCAACTTAGTATTCTTAAATTTATGTTTTTTTCTTT |
| | | | | TCAAATGAGGTTTTGTTACGGATTGATCAGTGTAGATGAGTGAAGT |
| | | | | GTTAGCCTAAGGGAATAGGGATAGGGAATCTCGATGTATCGGTTGC |
| | | | | AATAGTTATTCTTCTAGTGACCCACAAAATAATTTGAAGAATGTTTG |
| | | | | TCTAGTGGGGCGTATGGGGTTACCTTGCTATCGAGGTCTAGGGTGA |
| | | | | GAATCAAACTATAAGTATAGAAGGTTAAGATAGAGCTTAAGCCTTA |
| | | | | AGGTGTGAGTGAGTGAAGAATAAAGCATATTTTGAAGATGATGGT |
| | | | | GATCTTTGGTTGAATTGTTGGATATGTAGTCATAACTAGTGGGGTT |
| | | | | GCTGCCTGAGCCTGCATCGTGTGTCGGCTACTAGTATGGATTCTGG |
| | | | | GACGACTACGGATTGGGCCCCAGATACACAGTATTCCCTTTGTCAG |
| | | | | GATTACACTTGGAGCACAATGCATAGTCTAGGTTAATGATGACAGA |
| | | | | GTTGCCACCTACTCTTGAAATCTATAGTACACTTCAAGTTGACGTTAT |
| | | | | ATCAGAGAGCTACTTAGGGTGTTCTATGTTATTTAACCTCTCTTGTT |
| | | | | GATATTCTCTGGGGTGTTTTTTGGGTATTTGATTGCTCTTGGATTTCG |
| | | | | TTGATTCCCTTTTAAGTGATCCTGGCTTTTGATTTCCCCTATGAGGTC |
| | | | | GTTGATACCCACTGAAGCTTTTTTGGTTATTGTCCCATATTAAGTTTT |
| | | | | TTTGGGGGCTTATTGGTGGTTTGATATTTGATCACATGGTATTGTAT |
| | | | | TTTTTTTCTTCAAATATTGAAGTTATGAGTGTTGTTTCTACCATGTGA |
| | | | | TAAATATCTAAGTCTATGCTTAGTAACTACATTTGATACTTAAGTTAG |
| | | | | AACTGGATATTGAACTTTTACTAACCGATATGGTTAACTAAACACCA |
| | | | | TAGGCATTGATATCTGATGCCATTTAATTGCGTGTAGTTATTTAAATT |
| | | | | ATTTGCTTTCCTTATTTATACTTTGTCATTTGCCTTCATATATTCTTAT |
| | | | | GAAAGGTTTACATATTAATTTCTCGATATATCTTTATAAATAAAGTTT |
| | | | | AATGTAACACAGGGTGAGGCGCCACACTATTTCAGTATTTGTTGGT |
| | | | | GATGAGAGTGGAATGATAAATCGGATTGCAGGAGTTTTCGCAAGG |
| | | | | AGGGGATATAATATCGAGTCTCTTGCTGTTGGTTTAAACAAGGACA |
| | | | | AAGCTCTTTTCACTATAGTTGTATCTGGAACCGAAAGGGTGTTGCAG |
| | | | | CAAGTTATGAAACAGCTTCTAAAGCTTGTTAATGTTTTGAAGGTTGA |
| | | | | CTTCTGTTTCAAGTTTAAACCATCGATCCATTATGGTTATTTTCTTTTT |
| | | | | TAAGTTTCTCGAAGTTGACTACCATGAACAGGTCGAAGATATCTCAA |
| | | | | AGGAGCCACAAGTAGAACGTGAGTTGATGCTTATCAAGATCAATGC |
| | | | | AGATCCAAGTTACCGTATGGAGGTAATTATGCAATGTTAATCATGTT |
| | | | | TGGGTTTTTGGCTGTTATTCATAACATACTACATTATTCTGATTCATG |
| | | | | GAGACGAACATATTTCCATGACGGGGGTGTTTTAGATATGCCATTT |
| | | | | AAATTGTTCATATGATTAGTGTGACCTTTAGTACTGATAACATAAGT |
| | | | | GTTTGGATAAACAGATTTTGCTTATGACTGTATTATGATTATCTAGT |
| | | | | GGACAAGTAAAATGTGTGAGAATATGTTATCTCACCATATTCTTATG |
| | | | | GTTTTGATTTTCAGGTTAAGTGGTTAGTGGACATCTTTAGAGCTAGA |
| | | | | ATCGTTGATATCTCACAGGACTCGCTAACAATCGAGGTGATGGAAG |
| | | | | TTGAAATTTTACTTTAACCTTTAAAGTGTTTACTGTTTTTTCAGGCAC |
| | | | | AACTGATCTGGACTCAGTTTTGGGTCTTTATGTATTGTAATTTACAA |
| | | | | AAGTATAATGCTCTATAGAGGACCTGTGTTAGTTTGTAATTTTTCAA |
| | | | | TGACCTTTTTGATAAATATGAAATTCGTACACACTTTGACTCTTTGGA |
| | | | | ATTTAGGTAACTGGTGACCCAGGGAAAATGGTTGCAGTGCAAAGA |
| | | | | AACCTGAGTAAATTTGGGATTCGAGAAGTTGCAAGGACTGGAAAA |
| | | | | GTAAGTTATTATTAAGTCTCTATTTTTTCCTATTCTTCTTTCATATTGA |
| | | | | TTGTTAAATTCTGTATGCCTTAGATTGCTTTGAGAAGAGAAAAAATG |
| | | | | GGCGAGGATGCTCCTTTCTGGCGTTTTTCAGCAGCTTCATATCCAGA |
| | | | | CCTTGAAGAAATGAACGCAAGAACTACTCTTCAGGCCAAAAAAAGT |
| | | | | GCAGAATTTATAGAAACCGATATGTCTGTTGGGGTAAGTTGCTTTCT |
| | | | | CTTTTTGACTGACGCTAACCTGGGTTGTAGAGGTTGCAAATTAGTTG |
| | | | | GGAAATTGGGTCAAAGCGGAATTTTTTTTTGCGGATCGGCTAATGT |
| | | | | TGACCTGAATTGGTGTTTGTCCCAAGTTCAGTTTGATCTTTTATACAT |
| | | | | AATTAGTTTGTAAAACATAACTAAACTTTTTATATATGTAAATGCAA |
| | | | | CTATACGGCATTGCTTTTCAACAAAATGATGTAGGAGGCACCATTG |
| | | | | AAAAGAAAGATTTTAGTGGTTTTATGCTTAAAACTACATTTGGCAAC |
| | | | | TTTCAGCCGAAGCTCTTTGTTTTTAAACTTATTTGCTTTACTCGTTTG |
| | | | | ACCCGTTATAATATAAATTAGTCTGGTTCGACGATTATCTATCTTGCA |
| | | | | CGATGTAGTTTAGACTTGAATACTTCATACACAGATGGTGAATGAG |
| | | | | GTGGTATTTCTTATCTGTATTAAATTATATTTGTGAAGGGAGATGTT |
| | | | | TATCCAGTAGAGCAAGGAGATGACTTTCCATTTAATCAAGTTCTTGA |
| | | | | TGCACACTGGGGTGTTCTTAACGAAGAAGATGTAAGAACTTGATAT |
| | | | | CACTTCTCATATTTCACAAATGTCACTGAGGTGCATTGAAGTATCAG |
| | | | | TAATTTTTAGTTTGATGTTTCTAGACAAGCGGGCTTCGGTCACACAC |
| | | | | TTTATCGATGGTTGTAAATGACTCTCCCGGAGTTTTAAATATAGTAA |
| | | | | CAGGAGTTTTTGCTCGTAGAGGTTACAATATTCAGGTATGTTTTTTG |
| | | | | TATTCCGGATATTTCATTAATTTGCTTCCTGAACATATGGAAGTACCA |
| | | | | GAGGTTCAAGTAGTTTGGTGTTTGCATTTTTGATTCAGAGTCTAGCA |
| | | | | GTTGGTCATGCAGAAGTTGAAGGGCGATCCCGCATCACAACTGTCG |
| | | | | TTCCCGGTACAAATGAGTCTATCAGCAAGTTGGTTCAACAACTATAC |
| | | | | AAGTTGATAGATGTTCATGATGTGAGTATATATTGTAGTTGGAAAA |
| | | | | TGCTTCATATGTTAAGTTTATTATGAATGAGCAGTACTACTAGTCTC |
| | | | | ATTTTCCGCCCTCCAAGGTCCATTTGTAGTTGTTTACGACCCAGTTCT |
| | | | | TATGGAAAGGTAGATATGGGCTGTGCTGGTAAAATTGAAAGGTTTA |
| | | | | ACTAATAAGGAAACAGGTCAAGTGGTTCGAACAGGTTGAAAGTTTC |
| | | | | CCAGAGAGTGATACTCGTATAATTATTGTAATTCTCTTGATCGCTTTT |
| | | | | ATCACCAGTCTGTAAAAAACGAAAAAGTTTGACAAGATGTGTTTCA |
| | | | | CTTCAAATAGGTTATAGAAAAATAGATTTATTAAAATAATGTAATTT |
| | | | | TTGTTATTTTATTTGACCCAAAAGGACTTTGAATAGTACCAAAAGGA |
| | | | | CTCTTCATTGACCCAGTACCCACCTGTCTGTTTTGTCACCCCTACCCA |
| | | | | TTTGGTTGCTATTGATACTACTGAGGAGATATAATTATTCTATTACAC |
| | | | | CACCATTTTGTAGCTCTTGATCTGGTTTCTAGTTCACATTCCAGCTCT |
| | | | | TGAGGCTGCTTTTCTAATTCATTTGACTGATACTTGTTTTTCTGTTTA |
| | | | | GGTGATAGACCTAACATCCGTGCCATTTGCTGAGCGAGAGTTAATG |
| | | | | CTGATTAAAGTTGCCGTCAATTCCACAGCTCGACGCAGTGTTCTTGA |
| | | | | TATTGCAAGCATATTTAGAGCTAAAGCCGTAGATGTATCAGATCAC |
| | | | | ACAATTACACTCGAGGTGAAATTTAAATATAATTCACTTGCATATTA |
| | | | | CACGTGTTGACTGAAATTTCATGATCCTACTATTGAACGTTACAAAA |
| | | | | TTTCATGATCCTTACCTTTATTTTCACAGTTTTTCTGTTTTTCTTTCCCC |
| | | | | GTTGGGTTGTTTCAGCAATAAATTGTTTTTCTTGTATTTTCCAGGTCA |
| | | | | CTGGAGATGTAAATAAGATGGTAGCATTACAGAGACTGTTAGAGCC |
| | | | | ATGTGGAATTTGCGAGGTTTGTTTGTGAAATCTGTTATTTATAATAT |
| | | | | TTCTATTTGAACATGTCACCTTCCAGTTTAAAACCCACAGCTTGGTTT |
| | | | | GCTCATTTGGAACCATGAACAATCTCATTGTTCGTGACCAAACTACA |
| | | | | GTTCTAGATCTGAACTAGAGTGGTCAGTCTTTTTGTGTTGCAGTCCT |
| | | | | ATTTACTTAATCCTTGATCATTATTTGTAGGTTGCAAGAACAGGGAG |
| | | | | GGTGGCACTGTCTCGTGAGTCTGGTGTTGATTCATCTTACCTTCGTG |
| | | | | GCTATTCCTATCCCGTTTGATTCAGTCATTTAGAGTGTCTTTTTGTTTT |
| | | | | TGGTTGCTCGGAGTATAGAATTATATATTTTCAATGATTGAATATCT |
| | | | | ACAAGTCGTTTTAGCATGTATGTTTTAATCAAAGCTGCTGTTTTGAA |
| | | | | TGAGGGTTTGGTATGAACCCAATTTGAAAGATTTTGTTTTTTCTTTA |
| | | | | AATAGGCGCCTAAGCTCAACAAGGGCACATGGTTAGATTGGTTGAA |
| | | | | CTAGTTTTTTAGGGAAACATGTTCCTCATCAAGTTCTAATTTGCAAG |
| | | | | ATTGACCGAACCCATGTCCCTGCCATTTTTTCCGTTCATGTCTTGAGC |
| | | | | CGAAGTTATAACTCAGGTTTAAGCACACCCTCATTAAAACTCTTCTA |
| | | | | ATAAATTGAATGGAATTTTTAGTCCTCAAATATCCTCGCGAGATTTT |
| | | | | AGCTCGTGATTTATGCTGCCCACAGAGAATATGTGGTTTTTGATGAC |
| | | | | CCTATTTTTCAGTTAATTTCCAAACATCATCCACCAATTCCACTCTTTT |
| | | | | TGGGAGTCAAAATTTATTGACAAAATTAGAAAGAGAGAAACAACCA |
| | | | | AAAATCATAGAGGAATTAAAAATAAAAATATGAAAAAAGATGATCT |
| | | | | AACATGAGAATGGACATCGAACATGGAATATAATGTTAACAAATAT |
| | | | | CCACAAAGACTGAATTAATCAGAGAATGTGGCTTCAGAAAAGCGGA |
| | | | | AGTAGTTTGCAGGGTGGTGATCGAATGCAGAGGAAGGGAACTGGA |
| | | | | ACCGCCATGGTTGCGGTGGCTATAGACAAGGACAAATACAGCCAG |
| | | | | CAAGCGCTTAAATGGTCCATTGAACATCTTCTTACCCGTGGACAAAC |
| | | | | CGTTGTCCTCATTCATGTCATCCGGAAAACCCCTCCTACAGGCAATA |
| | | | | TTTGTATTCTGTCAAACGATTCAGATATTAACATTGTTTATAACAACT |
| | | | | AATTGAAAAAAAGAGAGAGAGAGAGAGAACCTTATAATCCCATATC |
| | | | | AATTTCAACTATTTGACCAATATATAACCCCTAACACGATTGTTGAG |
| | | | | TCACATAATCCTTGAAACAAGATAAAACAATTAGACTGCGTTAAGTT |
| | | | | ACAGAAAACGTTTTCTAATTTTCCACTTAGAATTCATAAGAAAATGG |
| | | | | AAGGGGTTTTTTAGTTCTAGAAACTTAAACTTCTGAAAATGCGTTTA |
| | | | | GTTGTAAGTGGAAAACGTAAGGAGTTTTTCATTTTTAAATAACAGAT |
| | | | | GTGCCAATATGAATGTAGGGGGAGGGATTGATGCATCTGCTGCAA |
| | | | | ACAAGCAACAAACTGAGAAGCAAACAAGAGATTTGTTCCTCACGTT |
| | | | | CCATTGCTTCTGTACGCGTAAAGAAGTACGTGTTTTACTACTATCTG |
| | | | | TCTTGTTGGGTATCTTTTGCATGGTTTTGCTAAAATTGTTGCACTGCA |
| | | | | GATACAGTGTTACGATGTTATACTTGAAGATGCAAATATAGCAAAA |
| | | | | GCACTCACGGAATATGCATCTTATGCTGCCATAGAATATTTGGTCCT |
| | | | | TGGTGCCTCATCACGGCATGGTTTCATCAGGTCATTTATTCAAATGA |
| | | | | AATTTTTGCAAAACCTTTAAATGTTTTAACGATTATCACCTTTGAGTT |
| | | | | AATATTGTAAGCATTTCTATAATGATAGCTGAATGCTTGGACTAATG |
| | | | | AGTAACGATTAAAACATTTATAAACAGATTTCGGAGTTCTGATGTGC |
| | | | | CAAGCCAAGTAATGAAATCGATACCAGATTTCTGCACTGTTTATGTC |
| | | | | ATCTCAAAAGGAAAGATATCCTCAGCAAAGAAATCTTCACGAACAG |
| | | | | TCCCGTTTCCATCTCCTATACGTGAGAAAATAGAAGAACAATCTAAC |
| | | | | ACCAACTTTGAAGCAAGTGTACGCCGCAAGAATAGTTTTAACATTA |
| | | | | AAAGTCAGTCATTTATTTTCAGTTTAAATACAATACATTCCCAAAAGT |
| | | | | TATCTTGTTTTTCATGACTCAAAGAACTTGTGAACAGAACCAGAAAT |
| | | | | CGCGCCAGAGAAGCCACTACTTCCGGCACCAGAAGACCCTGAATCA |
| | | | | ATTA |
| 1746 | Conyza | gDNA | 6631 | TTCCATATTTGGCATGATTTGGATTTTGAAAGGATAAGTTATAAATT |
| | canadensis | Contig | | TATCAATATATCCTTCAAACTTTTATATGAACTATAATAACTATGGGG |
| | | | | CTATAAATGTAATATTATGTATTTTTATCCTTTCTTATTCTTCTCTTTTA |
| | | | | ACTCAAGAATGCCTTTAAATCCTTTTATTCACTTTCTTTTCTTTTAAAT |
| | | | | GATAAAACTCAAGAATGCAATTTATAAATATAATTTTATATCCTTTCT |
| | | | | TCTCCTATTCAATCTTCTCTTTTATTCTCCTTTAATAAAACTCGAAAAT |
| | | | | ACAGTGTTAGGGTATTGCCAAAAGTCAAACCGGCAGAGTGCATATA |
| | | | | TATTGGAGGTGTTAGCCATTTTTATTTATAAAAAAAAAAAAAATCTG |
| | | | | TACGGGCGTGAGTGCATATATATATATATTGCGGTTTGGAAAAAAA |
| | | | | AAAAGAAAAACCTTTAAACAAAAAAATATGATTGAGCACGTTGACA |
| | | | | TAAAAATGTAATGTGTACCGACCACGGTCAATATGTCCTTACCACCC |
| | | | | GCCGCCTCCACCTTTAAGAGAGAGAGAGAGAGAGAGAGAGAATCA |
| | | | | TTATCAACATCATATAATAACACCGGAAAAGCAAAGCAACAAAAAT |
| | | | | GAGTGTCACAGCCACATTGCAGTCTGTCTCTACTCCGGCGTCACCAC |
| | | | | TAAGCCAGGGCTGCAGATTGGAACTACCACCTAAACTGCTTTCTTTC |
| | | | | ACTAAATCAAGTGTTGGTCGAAGGCTTGCTTTTAAGCTGGTTAATGC |
| | | | | TATCTCCGACTCCGGTAATGGAGCTCCGGCTTCACTTCTTTCTACTTC |
| | | | | TTCCCTTAATGGAGTTACTGCCCCGCCACTTTCTTCCAAGTATAACTC |
| | | | | TTCTCTTTTCTTTAATTCCTTCTTAAATTACTAGTAACTATAATAATAT |
| | | | | TTGTTTTTATAGAACCTTTCATGTTTTTCTTTACCCAAGCAGCTTATA |
| | | | | ATTAATAACTTTTTGCAAAAGCTTAATTAAAAAGCATTTGTCATATA |
| | | | | ATAGCTAGAAGGAAGGCAGGATTAGCTTTCAAGCAGTCTTCAAGCA |
| | | | | TGACATGAATTCAAGACAGTCTGCTTCTGAGAATCTGATTCTACTTT |
| | | | | CATGCCACCTTTCACTTCCCCGTGGCAATGCCTTTGATTCTGGCTTTA |
| | | | | GATTAGGGTCTTGCTTACAATGTTGTTATTTAAATTGTACATTTTTGT |
| | | | | CAGTAATTTTAGTGTAACCGAGGTATTTAGCTCAACTTTTTTTGGGG |
| | | | | TTAATTGTTTCAACTACTCGTAACCGAATTTTGATTGTTGTTTAAGAT |
| | | | | TCTCTTGCAACAAAGTTCTCAACTTTAAGCCTATAGTATGAACATATT |
| | | | | TCCTTGGAGTTATCCCAGAGAGATATTCGAGATACCTAGGCACATA |
| | | | | CGGGTCAATAAGTTATTTAGGGAAAATGATTACAGTATTTGGAGGA |
| | | | | ATACCCGTTGCACCGAAACTCTTCCAACATGTGCCAGTACATTTGTA |
| | | | | AAGTTACTGCAACTTAGTAAACTCTATGGGTAATACAACCATGTGTT |
| | | | | TACAGGTAGGAGTATCTTTTTGATAAAATTTATTTGGTTTATGTATT |
| | | | | GACCAGGGTGAAGCGCCACACTATCTCGGTGTTCGTAGGAGATGA |
| | | | | AAGTGGTATTATAAACCGAATCGCAGGAGTTTTCGCTAGAAGAGGT |
| | | | | TATAATATCGAGTCACTTGCTGTTGGTTTAAACAAGGACAAGGCTTT |
| | | | | GTTTACTATAGTTGTTTCTGGAACTGAAAAGGTCTTGCAACAAGTGG |
| | | | | TGGAGCAGCTCAACAAGCTTGTGAACGTCATAAAGGTTTGTATGAC |
| | | | | CATCAAATGTGAATCTTGGGTGCTCTTTGAACTTTATACATGATTAA |
| | | | | CGAGTTTGATGTATCAGGTGGAAGACCTTTCCAAGGAACCACAGGT |
| | | | | AGAACGGGAATTGATGCTTGTGAAGCTTAATGTAGATCCAACCACA |
| | | | | CGAGCTGAGGTTTTAGTGTTTTGCATACTTCTATGATATTCAATTATA |
| | | | | GAAAATGGCAGAGAGAATATTTTATTTGAGTCTGATACAGGGTTAC |
| | | | | TTTTACCCTTTAGATTATGTGGCTAGTAGACGTCTTTAGAGCCAACG |
| | | | | TTGTGGATGCATCAGAAAGCTCGTTGACTATAGAGGTACGTAGCTT |
| | | | | CTTATTCATTCAATCTGAACAGTTGCATACTCCCACAGTCTCACTGTT |
| | | | | TTGTTATTAGAACATGCGTCAACAAAAAAAAAAGTTTGTAATTTTGA |
| | | | | TAATATTGCTAGTAATTATGTAATGCTAATTTTATCATCTGGTCAATT |
| | | | | TAGGTTACCGGGGATCCTGGGAAGATTGTTGCTGTTCAGAGAAATT |
| | | | | TAGCCAAGTTCGGAATCCAAGAGCTCACTAGAACAGGAAAGGTAT |
| | | | | GCAAGCACAAGCATAAGTTTTCTAAATTTCTGTTATGTGTTGCATAT |
| | | | | ATTTCATAGAAATTTAAATTTTCTACCAGAATGATAGTTGGTCGCAA |
| | | | | AGACCATAAATGTCCATTGAATCTCCTGACTGAATTTGTTGTAACTTT |
| | | | | TAGATCGCTCTAAGACGGGAAAAACTGGGTGAAACTGCTCCATTTT |
| | | | | GGAACTTCTCTGCAGCATCTTACCCAGATCTAGAATCCGCAACTCCA |
| | | | | ATTGCTACTTCTTCAAGTGTTACTTGCACTGTTGATGAGGATTCGAC |
| | | | | TGCAATGTCAGGGGTAACCTGTCTAATCTTTAAAGGCTTTCCTTGCA |
| | | | | ATGTTTTGCTCCCTAATTGCATATCACCACCTTATAACTCTATTCTGTT |
| | | | | TAGCATTTAGGAATTGTGACAGAGATAGAAAGGCAATGTATAAAAT |
| | | | | ATCAATGATACAATTGAATGATAAAATGATAAAGACTTTTACTTTGA |
| | | | | TTTCTGCAAGACACAATATATGTAAGTTACTAAATCTGCAGTTTCAC |
| | | | | ACAACAATTAATTCTTTAGTTGGCACACTTTCACTGTGTCTGGTACTG |
| | | | | CTTAGACCAAATTTCTACTTATTTAACACTTTAATCTGTTAAGTGGTT |
| | | | | AACAAGATTTGAACAACCTAGTTGTTAAATTGATTTTTGATTTCATTT |
| | | | | GAGTTATTAATAATCTTGTTTGAATGAAGGGTGATGTGTATCCTGTG |
| | | | | GAGTACAACAATAGCTGCATAATGGATCAAGTTCTTGACGCCAATT |
| | | | | GGGGGGTAGTCTATGATGAAGATGTAAGATATCAATTTATCATCTTT |
| | | | | CATTTGTTCCTTATCGCTATATTTATACTTGATCCCTTTATTGATGAA |
| | | | | AGACAATTATATCTTAGATGGATCATAACTTATATGTTTCGCCAAAC |
| | | | | ACACTTCTAGTTTCTAAGATAGCGAACAGTTCAGCTTAATTAGTTAA |
| | | | | TATTCTTCAAGCTAAAGATGTATGTTGTTATTCTCATTCTAACACCCA |
| | | | | CAGGTTGTTACTATTTAGAAAAGGGGAAATAGTTATGGCATATAAT |
| | | | | CGTGTTTACTGAGGCTTGTGACTACTCATAGATTTCACTTTTGACAC |
| | | | | CCAAATTAATGTTGCAGTCAACTGGTCGGCAGTCTCATACTTTAAAC |
| | | | | ATTCTGGTCAATGATACTCCTGGAGTTCTCAACGTGGTCAGTGGAGT |
| | | | | TATATCCAGAAGGGGTTACAACATTCAGGTTCTTCTTCTTTTTTGCTA |
| | | | | ATTCTGAAGATACAATTGTTTTAAAGTAAGATGTAGTTTGCAAATAA |
| | | | | TACTAATAATCGTCTTTGGAACTGGTGTCAACAGAGTCTGGCCGTA |
| | | | | GGTCCAGCAGAAATGGAGGGTTTATCTCGCATTACGACTGTGATTG |
| | | | | CTGGTACAGATGAATCTATTTACAAGTTGGTTCAGCAGTTCCGCAAA |
| | | | | TTGGTGGATGTTCATGAGGTGAGATTTATTTCTTTAAAGTTAAACCT |
| | | | | CTTGAAATTCTCATAAAATCGACCACTATAATTTTCGCTGTATCTTAC |
| | | | | TTCAGGCATGGAAAACTTATAACTTAATGAAAGAAAATATTGTTTAT |
| | | | | ATTTAGGTCAAAGATATCACCCATCTACCATTTGCAGAACGTGAGCT |
| | | | | AATGTTAATTAAAGTTGCTGCTAGCTCTGCTGTTCGAAGGGATGTCC |
| | | | | TAGACATCGCCACCATCTTTCGAGCCAAGCCTGTTGATGTTTCTGAT |
| | | | | CACACTCTCACACTAGAAGTAAATTTTCTACGTATTGATTTTGAGGT |
| | | | | GTTTCTATGTCAAATATTCTTGTTTCTGATATCTTCTGTTATTCATATT |
| | | | | TCAGCTCACAGGAGACTTCAACAAGTTGTTTGCATTGCAAAGATTGT |
| | | | | TAGAGTCCTATGGAATTTGTGAGGTTCGTTCAAACTTTTGACCTCGA |
| | | | | ACTCCAATACTGGGTTTCACTTTTCAATCTTCTGCACAACTTTATTAT |
| | | | | GGCCTGCTCCTATCTGGTTAGGGACTTGGGGTTCTCCCCAGCAATTC |
| | | | | ATTCTCTCAAACCCCTAGTCTCGACATTGTATCATGCCTCACTCTGAT |
| | | | | ATATCTTCTATTTTGGAGCTGTATTACTATCCAAATTGTGTTTATTAC |
| | | | | ACGAAATATTATTACTAGTAAAAACAATAGTCATTAAGGTATAACTG |
| | | | | TGCATGGTCTTTGATGCTGTTTTCTCTGCATTGCATCATTTCCCTAAT |
| | | | | GGTGCCTAATTGCATTTTAATATGCAGGTCGCAAGGACTGGTCGAG |
| | | | | TGGCATTGGTGCGAGAGTCAGGGGTCGATTCTACATATCTACGTGG |
| | | | | GTACTCCCTTCCGTTATAATAACACCGGAAGTTATCCCTCAATTGTAT |
| | | | | GTTGCATTATTGTAGCTGCAAGTGAACACAACTGTTCAGTGTCTTTT |
| | | | | GCACTGATGGCTGCGGATGTGAGAGTATGACTTCTTGCTAGAAAAA |
| | | | | GAAAAAAGGAATGTTTAGTAGATCAATTTATGTTGTATTATGGTATG |
| | | | | CCGTGTGATGTCAAAACTGTAACAGCTTTCATTCATAGAAGTTTCAT |
| | | | | ACTTAAAATGTGATGTTAAGCAAATTTATAAGTAATAATGTTTGTAC |
| | | | | TTCTATACTTCTATATAAAAGTTATAATCCCATATTGAAAGTTAAAAA |
| | | | | AAATAAGACATACAAATTGACTAAATTACTTTTAATGAATTAAAATC |
| | | | | ACCACCCTTTAATATTAAATTACACCATCAGCTCCTTATATTATAAAA |
| | | | | GATTTATATTACCTTCTTTAAATCAAACACGTTTACATTAATTACCTA |
| | | | | CACCATTTGACGTCGTGACCACCATCACCATCCGTCGCCGCCATCAT |
| | | | | ACTACCACATTGCGCGATAATGTGCTAGTTATATACCTAGAGATTAT |
| | | | | TGGTGGAATTGGTTGAAATATACGAGTCTTTATTTTGTCAACGTTAT |
| | | | | ACACTCGAGGGGTAGAACTGAACAAATTATGTATGTACTTGGTGGA |
| | | | | ACGGTGGGACAAAATGAGGAGAAAAGCTATATAATACTTGTCCCTG |
| | | | | ACTTCTTGAGCCATTTTAATGAAGCAAATGTCCTCCAAAAAACCTTTT |
| | | | | TTCTTCGGGTCGAGCGTTAGCATCATTATAACATTTTAGACTAATTTC |
| | | | | TAAGCATTCCATTATGATCCTCAGTATACCAGACTTTATACAGCTTTG |
| | | | | AGAAATAAAACACTTGATATTTCTTGCACAAATATTTGCCATTATGA |
| | | | | TCTCAGTATACCAGACTTTATAAAGATTATATATACAAAACCCAAGT |
| | | | | AACCCAAGACTTAACAACATTCGACTTCTAACCTTAATAAGTAATAC |
| | | | | ATCACATACCCATCCCCATCCCATCCACCCAAAAGCCGAGAAAAAAA |
| | | | | AAAGTTATGAACACATAATTAACACTTATACTCGAGGCAAAAAAAA |
| | | | | CTCTCAATAACCATGCCCTCTTCTGGAGACCTGGACAACGTATAAGA |
| | | | | ATCATTCTCTTGTCAAAATGAATATATATCGAGATCAGGAAGATGAT |
| | | | | CACCTCATCTTGTGAATAACTAAGCCAGATAACTCTTAAGGAGTATG |
| | | | | CAGATCGCGTAAATGGTCAACAACATCACGTGAACCAGTCAACCAC |
| | | | | TTGATATCAGAACGGTGAAGTACATTTGCATGGACACGGGCTGAAT |
| | | | | TATCAGGTTTCTGCTCCATAGGCATTGACCTCTCTGAAAAGCTGTGG |
| | | | | GTATGGCGCACACGAACTCTGTGACATTTTGTTTCTGTTGTACAGCT |
| | | | | GCCCCTCACTTCAACCATCAACATAACTTCCTTATCACGAACGTCTTC |
| | | | | GCACCAGCAGTTTTGCGGAGCACCATCTACATATTCCTCTAGGGTTT |
| | | | | CATATCCTTGGTGATGAACTGATATCTCTACAATATGATTTGGCTCT |
| | | | | ATTATACCCACTGTTGGCTTGACCTGGTTCAAAGCAATAGACAATTG |
| | | | | TTAGCTACCTTCACCGTGAGTGCATCACAACAAATTTTTTAGTCCAAT |
| | | | | GTTCAATGCATGTGATAAATTCACCTCAAGCCATCGTGGAAAGCCAT |
| | | | | AAGAACCTCTTGGACGGTGACTGGAAGCCTGTTTTCCATCTTTAATA |
| | | | | GTACACTGGCCTTCACATATAACTTTAAACAGAGCTTCATCTTCCCC |
| | | | | GCATTTATTGGTAATCCTCAAGACTGATGAATCCCTGTCATGAAGAA |
| | | | | TTATATTGTTCGTACTGGGAATAGCTTCTGGAACATTGCACTGTTCT |
| | | | | TCAAGAATACTCCTAATTTTTTTATTAGATTTGATAACTTCTCCAAAT |
| | | | | ATTTTTCTTCTTCTTGACTCATCTACTCGAGCCAGTTCCACGTTAAAG |
| | | | | ATGCAACGCACAGGCTTATGATCACTATCTGTCACAT |
| 1747 | Conyza | gDNA | 5498 | TTAGATTAGGGTCTTGCTTACAATGTTGTTATTTAAATTGTACATTTT |
| | canadensis | Contig | | TGTCAGTAATTTTAGTGTAACCGAGGTATTTAGCTCAACTTTTTTTG |
| | | | | GGGTTAATTGTTTCAACTACTCGTAACCGAATTTTGATTGTTGTTTAA |
| | | | | GATTCTCTTGCAACAAAGTTCTCAACTTTAAGCCTATAGTATGAACA |
| | | | | TATTTCCTTGGAGTTATCCCAGAGAGATATTCGAGATACCTAGGCAC |
| | | | | ATACGGGTCAATAAGTTATTTAGGGAAAATGATTACAGTATTTGGA |
| | | | | GGAATACCCGTTGCACCGAAACTCTTCCAACATGTGCCAGTACATTT |
| | | | | GTAAAGTTACTGCAACTTAGTAAACTCTATGGGTAATACAACCATGT |
| | | | | GTTTACAGGTAGGAGTATCTTTTTGATAAAATTTATTTGGTTTATGT |
| | | | | ATTGACCAGGGTGAAGCGCCACACTATCTCGGTGTTCGTAGGAGAT |
| | | | | GAAAGTGGTATTATAAACCGAATCGCAGGAGTTTTCGCTAGAAGAG |
| | | | | GTTATAATATCGAGTCACTTGCTGTTGGTTTAAACAAGGACAAGGCT |
| | | | | TTGTTTACTATAGTTGTTTCTGGAACTGAAAAGGTCTTGCAACAAGT |
| | | | | GGTGGAGCAGCTCAACAAGCTTGTGAACGTCATAAAGGTTTGTATG |
| | | | | ACCATCAAATGTGAATCTTGGGTGCTCTTTGAACTTTATACATGATT |
| | | | | AACGTGTTTGATGTATCAGGTGGAAGACCTTTCCAAGGAACCACAG |
| | | | | GTAGAACGGGAATTGATGCTTGTGAAGCTTAATGTAGATCCAACCA |
| | | | | CACGAGCTGAGGTTTTAGTGTTTTGCATACTTCTATGATATTCAATTA |
| | | | | TAGAAAATGGCAGAGAGAATATTTTATTTGAGTCTGATACAGGGTT |
| | | | | ACTTTTACCCTTTAGATTATGTGGCTAGTAGACGTCTTTAGAGCCAA |
| | | | | CGTTGTGGATGCATCAGAAAGCTCGTTGACTATAGAGGTACGTAGC |
| | | | | TTCTTATTCATTCAATCTGAACAGTTGCATACTCCCACAGTCTCACTG |
| | | | | TTTTGTTATTAGAACATGCGTCAACAAAAAAAAAAGTTTGTAATTTT |
| | | | | GATAATATTGCTAGTAATTATGTAATGCTAATTTTATCATCTGGTCAA |
| | | | | TTTAGGTTACCGGGGATCCTGGGAAGATTGTTGCTGTTCAGAGAAA |
| | | | | TTTAGCCAAGTTCGGAATCCAAGAGCTCACTAGAACAGGAAAGGTA |
| | | | | TGCAAGCACAAGCATAAGTTTTCTAAATTTCTGTTATGTGTTGCATA |
| | | | | TATTTCATAGAAATTTAAATTTTCTACCAGAATGATAGTTGGTCGCA |
| | | | | AAGACCATAAATGTCCATTGAATCTCCTGACTGAATTTGTTGTAACT |
| | | | | TTTAGATCGCCCTAAGACGGGAAAAACTGGGTGAAACTGCTCCATT |
| | | | | TTGGAACTTCTCTGCAGCATCTTACCCAGATCTAGAATCCGCAACTC |
| | | | | CAATTGCTACTTCTTCAAGTGTTACTTGCACTGTTGATGAGGATTCG |
| | | | | ACTGCAATGTCAGGGGTAAGCTGTCTAATCTTTAAAGGCTTTCCTTG |
| | | | | CAATGTTTTGCTCCCTAATTGCATATCACCACCTTATAACTCTATTCT |
| | | | | GTTTAGCATTTAGGAATTGTGACAGAGATAGAAAGGCAATGTATAA |
| | | | | AATATCAATGATACAATTGAATGATAAAATGATAAAGACTTTTACTT |
| | | | | TGATTTCTGCAAGACACAATATATGTAAGTTACTAAATCTGCAGTTT |
| | | | | CACACAACAATTAATTCTTTAGTTGGCACACTTTCACTGTGTCTGGTA |
| | | | | CTGCTTAGACCAAATTTCTACTTATTTAACACTTTAATCTGTTAAGTG |
| | | | | GTTAACAAGATTTGAACAACCTAGTTGTTAAATTGATTTTTGATTTCA |
| | | | | TTTGAGTTATTAATAATCTTGTTTGAATGAAGGGTGATGTGTATCCT |
| | | | | GTGGAGTACAACAATAGCTGCATAATGGATCAAGTTCTTGACGCCA |
| | | | | ATTGGGGGGTAGTCTATGATGAAGATGTAAGATATCAATTTATCAT |
| | | | | CTTTCATTTGTTCCTTATCGCTATATTTATACTTGATCCCTTTATTGAT |
| | | | | GAAAGACAATTATATCTTAGATGGATCATAACTTATATGTTTCGCCA |
| | | | | AACACACTTCTAGTTTCTAAGATAGCGAACAGTTCAGCTTAATTAGT |
| | | | | TAATATTCTTCAAGCTAAAGATGTATGTTGTTATTCTCATTCTAACAC |
| | | | | CCACAGGTTGTTACTATTTAGAAAAGGGGAAATAGTTATGGCATAT |
| | | | | AATCGTGTTTACTGAGGCTTGTGACTACTCATAGATTTCACTTTTGA |
| | | | | CACCCAAATTAATGTTGCAGTCAACTGGTCGGCAGTCTCATACTTTA |
| | | | | AACATTCTGGTCAATGATACTCCTGGAGTTCTCAACGTGGTCAGTGG |
| | | | | AGTTATATCCAGAAGGGGTTACAACATTCAGGTTCTTCTTCTTTTTTG |
| | | | | CTAATTCTGAAGATACAATTGTTTTAAAGTAAGATGTAGTTTGCAAA |
| | | | | TAATACTAATAATCGTCTTTGGAACTGGTGTCAACAGAGTCTGGCCG |
| | | | | TAGGTCCAGCAGAAATGGAGGGTTTATCTCGCATTACGACTGTGAT |
| | | | | TGCTGGTACAGATGAATCTATTTACAAGTTGGTTCAGCAGTTCCGCA |
| | | | | AATTGGTGGATGTTCATGAGGTGAGATTTATTTCTTTAAAGTTAAAC |
| | | | | CTCTTGAAATTCTCATAAAATCGACCACTATAATTTTCGCTGTATCTT |
| | | | | ACTTCAGGCATGGAAAACTTATAACTTAATGAAAGAAAATATTGTTT |
| | | | | ATATTTAGGTCAAAGATATCACCCATCTACCATTTGCAGAACGTGAG |
| | | | | CTAATGTTAATTAAAGTTGCTGCTAGCTCTGCTGTTCGAAGGGATGT |
| | | | | CCTAGACATCGCCACCATCTTTCGAGCCAAGCCTGTTGATGTTTCTG |
| | | | | ATCACACTCTCACACTAGAAGTAAATTTTCTACGTATTGATTTTGAG |
| | | | | GTGTTTCTATGTCAAATATTCTTGTTTCTGATATCTTCTGTTATTCATA |
| | | | | TTTCAGCTCACAGGAGACTTCAACAAGTTGTTTGCATTGCAAAGATT |
| | | | | GTTAGAGTCCTATGGAATTTGTGAGGTTTGTTCAAACTTTTGACCTC |
| | | | | GAACTCCAATACTGGGTTTCACTTTTCAATCTTCTGCACAACTTTATT |
| | | | | ATGGCCTGCTCCTATCTGGTTAGGGACTTGGGGTTCTCCCCAGCAAT |
| | | | | TCATTCTCTCAAACCCCTAGTCTCGACATTGTATCATGCCTCACTCTG |
| | | | | ATATATCTTCTATTTTGGAGCTGTATTACTATCCAAATTGTGTTTATT |
| | | | | ACACGAAATATTATTACTAGTAAAAACAATAGTCATTAAGGTATAAC |
| | | | | TGTGCATGGTCTTTGATGCTGTTTTCTCTGCATTGCATCATTTCCCTA |
| | | | | ATGGTGCCTAATTGCATTTTAATATGCAGGTCGCAAGGACTGGTCG |
| | | | | AGTGGCATTGGTGCGAGAGTCAGGGGTCGATTCTACATATCTACGT |
| | | | | GGGTACTCCCTTCCGTTATAATAACACCGGAAGTTATCCCTCAATTG |
| | | | | TATGTTGCATTATTGTAGCTGCAAGTGAACACAACTGTTCAGTGTCT |
| | | | | TTTGCACTGATGGCTGCGGATGTGAGAGTATGACTTCTTGCTAGAA |
| | | | | AAAGAAAAAAGGAATGTTTAGTAGATCAATTTATGTTGTATTATGG |
| | | | | TATGCCGTGTGATGTCAAAACTGTAACAGCTTTCATTCATAGAAGTT |
| | | | | TCATACTTAAAATGTGATGTTAAGCAAATTTATAAGTAATAATGTTT |
| | | | | GTACTTCTATACTTCTATATAAAAGTTATAATCCCATATTGAAAGTTA |
| | | | | AAAAAAATAAGACATACAAATTGACTAAATTACTTTTAATGAATTAA |
| | | | | AATCACCACCCTTTAATATTAAATTACACCATCAGCTCCTTATATTAT |
| | | | | AAAAGATTTATATTACCTTCTTTAAATCAAACACGTTTACATCAATTA |
| | | | | CCTACACCATTTGACGTCGTGAACACCATCACCATCCGTCGCCGCCA |
| | | | | TCATACTACCACATTGCGCGATAATGTGCTAGTTATATACCTAGAGA |
| | | | | TTATTGGTGGAATTGGTTGAAATATACGAGTCTTTATTTTGTCAACG |
| | | | | TTATACACTCGAGGGGTAGAACTGAACAAATTATGTATGTACTTGG |
| | | | | TGGAACGGTGGGACAAAATGAGGAGAAAAGCTATATAATACTTGT |
| | | | | CCCTGACTTCTTGAGCCATTTTAATGAAGCAAATGTCCTCCAAAAAA |
| | | | | CCTTTTTTCTTCGGGTCGAGCGTTAGCATCATTATAACATTTTAGACT |
| | | | | AATTTCTAAGCATTCCATTATGATCCTCAGTATACCAGACTTTATACA |
| | | | | GCTTTGAGAAATAAAACACTTGATATTTCTTGCACAAATATTTGCCA |
| | | | | TTATGATCTCAGTATACCAGACTTTATAAAGATTATATATACAAAAC |
| | | | | CCAAGTAACCCAAGACTTAACAACATTCGACTTCTAACCTTAATAAG |
| | | | | TAATACATCACATACCCATCCCCATCCCATCCACCCAAAAGCCGAGA |
| | | | | AAAAAAAAAAGTTATGAACACATAATTAACACTTATACTCGAGGCA |
| | | | | AAAAAAACTCTCAATAACCATGCCCTCTTCTGGAGACCTGGACAAC |
| | | | | GTATAAGAATCATTCTCTTGTCAAAATGAATATATATCGAGATCAGG |
| | | | | AAGATGATCACCTCATCTTGTGAATAACTAAGCCAGATAACTCTTAA |
| | | | | GGAGTATGCAGATCGCGTAAATGGTCAACAACATCACGTGAACCAG |
| | | | | TCAACCACTTGATATCAGAACGGTGAAGTACATTTGCATGGACACG |
| | | | | GGCTGAATTATCAGGTTTCTGCTCCATAGGCATTGACCTCTCTGAAA |
| | | | | AGCTGTGGGTATGGCGCACACGAACTCTGTGACATTTTGTTTCTGTT |
| | | | | GTACAGCTGCCCCTCACTTCAACCATCAACATAACTTCCTTATCACGA |
| | | | | ACGTCTTCGCACCAGCAGTTTTGCGGAGCACCATCTACATATTCCTC |
| | | | | TAGGGTTTCATATCCTTGGTGATGAACTGATATCTCTACAATATGAT |
| | | | | TTGGCTCTATTATACCCACTGTTGGCTTGACCTGGTTCAAAGCAATA |
| | | | | GACAATTGTTAGCTACCTTCACCGTGAGTGCATCACAACAAATTTTT |
| | | | | TAGTCCAATGTTCAATGCATGTGATAAATTCACCTCAAGCCATCGTG |
| | | | | GAAAGCCATAAGAACCTCTTGGACGGTGACTGGAAGCCTGTTTTCC |
| | | | | ATCTTTAATAGTACACTGGCCTTCACATATAACTTTAAACAGAGCTTC |
| | | | | ATCTTCCCCGCATTTATTGGTAATCCTCAAGACTGATGAATCCCTGTC |
| | | | | ATGAAGAATTATATTGTTCGTACTGGGAATAGCTTCTGGAACATTGC |
| | | | | ACTGTTCTTCAAGAATACTCCTAATTTTTTTATTAGATTTGATAACTTC |
| | | | | TCCAAATATTTTTCTTCTTCTTGACTCATCTACTCGAGCCAGTTCCAC |
| | | | | GTTAAAGATGCAACGCACAGGCTTATGATCACTATCTGTCACA |
| 1748 | Conyza | gDNA | 1105 | CTCTCTCTCTACTTTCTATTGTTTTCTCTTGAGAAAAAGTTGGAACCT |
| | canadensis | Contig | | TTTTCTCAGAAAAAGTGAGAAAACTTGCGTTGGGAAGGGCCTTACC |
| | | | | AACTTTATATACACATAGAATTCAGTTGTGTTGCATACTTGCATGAG |
| | | | | GCATAAGATAATAAGGGAGCTCAAATTCTGACATTAATGGAATTTC |
| | | | | ACCCTAACAATAATATCTCCATTCTCTTCAAATCCGATCCTTAGTTTT |
| | | | | CTACAGCCACATCATCGCCACATCATACACATATATTATACATACAC |
| | | | | AAATTCAAAAATTCTCTCGTCTTCCCGAGGATACCATCCCAGAACTT |
| | | | | GGGTAGAACGACTTCGTAACTATAAAGTTTTGAGAAAGCAGCTTCG |
| | | | | GAACATAGAAGAACGTGCTCCAGAACGTGTGGTGGCAATAAAGAC |
| | | | | ACGAGAACTTGGGTTCTAGAACGCCTTAATTATTATCTTAATCATTA |
| | | | | TCATTTAGTATCATACTAGATTTTAGACCCGTGTCAAATACCCGGGT |
| | | | | TTTACAACATTATTGATATAAGAATTAGTATATGGAAAAAAATTATA |
| | | | | CGTTAAATGTAAAAATACACTTAAAAAAACTGAGATATTTAAATGTT |
| | | | | AATACTGAATGCTAAATCATATAATTAAGGCTGGATGGTGTAACAA |
| | | | | AGTTGTCTTTGATACACACTTTTATAGAAAAGCAATATCTTAACTTTG |
| | | | | ATTACACTATTGACTGAGTTTTCATTGATGTCTTGCAAAAAAGTAAT |
| | | | | TTTATTTTTTGTCAGACATGATTGTTAAGAACAATAAAAGTAGCGGC |
| | | | | TGTTTCGCGAGATTTTTAAAGATTTCGTTTATTGTTATTTTTTTTTATG |
| | | | | TTCAATTTATATAAAAAAAATCTATATCCTAATAAATATAGTTTGATT |
| | | | | CCAATTAATAATAACAACAATGATTATCCTAATTTTAGTCTGATTAG |
| | | | | GAATAGTAATAATATTTGATTATAGTTAATAATATAAAATAAAATAT |
| | | | | TGATATAAATATGTAAACTTACTAACTTTTAGCTATATTTTGTTATTA |
| | | | | AATTAGATATTATGCAATAAAATATTAATTATTTTTAAATTGGATTAA |
| | | | | ATGTGTAAATTGGTGATGGAAA |
| 1749 | Conyza | gDNA | 246 | AAGGAAAGGCGAAATGAATTGGGTGGGGTGGAAGAGGAGGTGGA |
| | canadensis | Contig | | CTGTCATGTCACCAGAAAGGCCATATCACACGCTGACGTGGCAAAA |
| | | | | TATTGCTATATTGAGTAATTTTTGAAAGGTCATTTCTAATATCGACAA |
| | | | | GTTTTAAAGGTGACTGCTAGTTGCGTGAATTGGACCAAAGTTGCTTT |
| | | | | CTATTTTGTGCGGATTTCCCTTAAAAGAAAGGAAAGTGATGGAAAG |
| | | | | GAAAAGTGAGGGGTT |
| 1750 | Euphorbia | cDNA | 598 | GGAGCCTTATGATGAATTCTCTGTGCATCAAGTTCTCGATGCTCATT |
| | heterophylla | Contig | | GGGGAGTTCTCTATGATGAAGATTCTAGTGGACTTCGATCACATAC |
| | | | | GTTATCCATACTTGTGAATGATTCTCCTGGTGTTCTCAACACGATTAC |
| | | | | CGGGGTTATGTCTCGGCGAGGTTATAACATCCAGAGTCTTGCTGTG |
| | | | | GGTCGAGCTGAGAGAGAGGGACTTTCTCGCATTACAACTGTTATCC |
| | | | | TTGGAAATGATGATACAGTTAGAAAGTTGGTTCTGCAACTTCACAA |
| | | | | GTTGATTGATATACATGAGGTACAAGATATTACACATTTGCCATTTG |
| | | | | CAGAGCGAGAGTTAATGCTGATAAAGGTGGCAGTCAATACTGCAG |
| | | | | CCAGGAGAGATGTCCTAGATATTGCTAGCATATTTCGGGCCAAAGC |
| | | | | TGTTGATGTGTCTGACCACACAATTACCCTAGAGCTTACTGGTGATT |
| | | | | TAACAAAGATGGCGGCCCTGCAGAAACTATTAGAGCCATATGGGAT |
| | | | | TTGTGAGGCAGCACGGACTGGAAGGGTGGCATTGGTGAGGGAATC |
| | | | | AGGAGTGGATTCCACTTATCTCCGTGGGTACCATCTCCCTTTG |
| 1751 | Euphorbia | cDNA | 598 | CCCCCCTTACCTCGCTCCAAGGTGCAGTTGCACACGATATCAGTCTT |
| | heterophylla | Contig | | TGTGGGTGATGAGAGCGGGATGATAAATAGAATAGCTGGCGTTTTT |
| | | | | GCTAGAAGGGGTTACAACATTGAGTCCCTTGCTGTTGGTTTGAACA |
| | | | | AGGACAAGGCTCTTTTTACTATTGTTGTTTCCGGAACTGACAAGGTT |
| | | | | TTGCAACAAGTTGTCGAGCAGCTCAACAAGCTTGTCAATGTCATCAA |
| | | | | GGTGGAAGATATCTCTAAGGAACCACATGTGGAACGTGAACTGAT |
| | | | | GCTTATAAAACTTAATGTGGATCTAGAAACTCGTCCCGAGATTATGT |
| | | | | GGCTGTTGGATGTCTTCAGAGCTAAAGTTGTTGATACCTCAGAGCA |
| | | | | TACAATGACTATTGAGGTTACCGGAGACCCTGGTAAAATGGTTGCT |
| | | | | GTTGTAAGGAACCTAAGCAAGTTCAGAATCAAAGAGATTTCTAGAA |
| | | | | CTGGAAAGATTGCTCTAAGACGGGAAAGGATGGGCGAGACAGCAC |
| | | | | CGTTCTGGAGGTTTTCTGCAGCTTCCTATCCGGACCTTGAAAGTATG |
| | | | | CAACCTGGTGCTGTTGAAAATGTGCAACCTGCTGGTGCCTCAC |
| 1752 | Euphorbia | cDNA | 595 | GATAGCTTTACCGTAACTCAAGTTCTCGATGCTCATTGGGGTGTCCT |
| | heterophylla | Contig | | CAATGAGGAAGATACAACTGGACTTCGATCCCACACTCTATCTATG |
| | | | | GTAGTAAATGACTCTCCTGGAGTTCTCAACATCGTGACAGGGGTAT |
| | | | | TTGCTCGAAGGGGCTATAACATTCAGAGTTTGGCAGTTGGGCATTC |
| | | | | AGAAATTGAGGGGCGCTCACGAATTACAACTGTGGTTCCTGGTACT |
| | | | | GATGAATCAATTAGCAAGTTGGTGCAGCAACTTTACAAGCTAATAG |
| | | | | AGCTCCACGAGGTTCGGGATCTTACCCACTTGCCATTTGCTGAACGA |
| | | | | GAGTTGATGCTGATAAAAATTGCGGTGAATGCTGCTGCACGGCGTG |
| | | | | ATGTCCTCGACATTGCCAGCATATTCAGAGCAAGAGCCATTGATGT |
| | | | | ATCGGACCACACAATAACTCTCGAGCTTACCGGAGATCTCGACAAG |
| | | | | ATGGTCGCATTGCAAAGGTTGTTGGAACCCTATGGCATTTGCGAGG |
| | | | | TGGCAAGAACAGGGCGAATAGCATTGGTTCGAGAGTCTGGTGTGG |
| | | | | ATTCTAATTATCTCCGTGGATACTCGTTTCCTATATAATAAA |
| 1753 | Euphorbia | gDNA | 5587 | ATTGTTGAGTTTAAAAATGCAAAATTGATATAATATTTTTTATTATGA |
| | heterophylla | Contig | | AATAGATGTAGAGAGTACTCATAATTTAGTATTTTTTTTAAAAAAAT |
| | | | | CGAAACCAATTCAACTTAGCCGTGTCTGAAAATATTGAAGGTGGTTT |
| | | | | GTTTGAAATGAGAATTAACAAATAAAAGCCGGCCCAAACCCGTCGC |
| | | | | AATCCGGGCCAGGAACGGTGGTAATAATGACCAATTGCTTAAGAAA |
| | | | | CTCATTAGCCCATATTATTATTTTGATAAAAGGATAAAAGTAATTTA |
| | | | | CACGCGTGATAACGCCAAATTAGCGGGGACATATTAGCAAATAATT |
| | | | | TGAAAATAATTAGGAAATAATTAAAGTTTAATTATGTAAAGACAAC |
| | | | | AGTGTAGTCCGTAGTAGATAGAAGAGGCGAAGGAGAAGGTGGTTA |
| | | | | GTACTGGAGGGCGAAAGGACAGAAGAAGCAGAAAAATATCACATT |
| | | | | TTAATGGTGTTTTGTTGTGGTTTATCTTATTGTACTGTATGAATTGCG |
| | | | | GCGCTTCCGCCATCTGCGTCCCCTCCTTAAGATCTCATTATCTTGTTA |
| | | | | ATCTTACTACCACTACAATCACAATGCCTGCGGCTGCTGCTCTCTCAT |
| | | | | CTTCCCTTGTTGCCGCCGCACCCTCTCACGATTCCTCTCCTTTGACAA |
| | | | | CTCCTTTTTTAAGGAGCAGCAGCAGCAGCTCGGCCCCATTCCCTTTT |
| | | | | CTCCGGCCAAGGACCAATGCTCCTCTTAAGCTCTCCGCTACCCTCAT |
| | | | | CCACCACCCCGGAAACCAACCCGCTCTTCCCCCCTTACCTCGCTCCA |
| | | | | AGTATAAGTCTCACGCTTTTCATGCTTCTTGGATTTTTTTCTAGTATT |
| | | | | AGGCTGCAATTTTATGAACTTAACTGAAGCTCAACTGTAATTGAACT |
| | | | | TATTTCGGTACGAATTTATAACTAAGCATACCTGAACTGAAATGGAT |
| | | | | CAGTCTGATTGTATTCTGAGAGAACAGGGCCTTAGTACTTCCGATTC |
| | | | | CATGTGAAAATGCTTCTGTCTTGTTACTGCTTTTTATTTATGTGTTTC |
| | | | | CTTTTCTTCTATATTTTGAACTTCATGGCCTGATTTTTATATGATGAAT |
| | | | | CTTATGAGTTCGTTATGATTTTTGTTCTAAGTTGCAGGGTGCAGTTG |
| | | | | CACACGATATCAGTCTTTGTGGGTGATGAGAGCGGGATGATAAATA |
| | | | | GAATAGCTGGCGTTTTTGCTAGAAGGGGTTACAACATTGAGTCCCT |
| | | | | TGCTGTTGGTTTGAACAAGGACAAGGCTCTTTTTACTATTGTTGTTT |
| | | | | CCGGAACTGACAAGGTTTTGCAACAAGTTATGGAGCAGTTGCAGAA |
| | | | | ACTTGTTAATGTTTTGAAGGTTGTATTCTTATTTCGAGGGAGTCCCTT |
| | | | | TATCTACTGATTTTAGTTTTATGGTTATAATTGTTGGCACATAGTCCA |
| | | | | ATTGAAGAGAAATGGATACTGGATATATAGAAGAGACAGATTTCTA |
| | | | | TTTGCCTATTTTCATATTATGGCTTTTGTTACATTGTTCGGATTGTAA |
| | | | | TTTCTCCATATGCTGTTGTTTACTATGATATTTAGGTTGAGGATCTAT |
| | | | | CGTCCGAGCCACAGGTAGAACGTGAGCTAATGCTTATTAAACTGAA |
| | | | | GGCAGATGCTAATAACCGTGCTGAGGTAACTGGATTTTCATCGTTG |
| | | | | TTGAGTATGGAAATGCTTTGAGGATTCCAATTTGAATTGCTCCCTTG |
| | | | | TTTTCTTCGGCTACATTTTGTTCTTCGGTGTGATTTTCAGATTATGTG |
| | | | | GTTGGTGGACATCTTCAGAGCAAAAATAGTGGACATCTCTGAGCAT |
| | | | | TCAGTTACAATTGAGGTAAATGATTTGTTAATTGATTCCAATTCTAG |
| | | | | AGATAAAAAGATCCTAGTGGATGACCCCTCTGATACTTTAAAAATTA |
| | | | | AAGATTATTAATAGTTGTTTAATAATATTGACAAATGAATGAACTGG |
| | | | | AAATATTGAACATATTGTTGTTGAAAAGTTGTGCATATTAATTATGA |
| | | | | AGTTAAGTTTGATGCAAACTTGTAGCTAATCATTTTTCTAGTAATTTA |
| | | | | GTTTCAATGATAGTATCAGTGTAATATATGATATGTGGAAATTTTTA |
| | | | | AGGGCTTTAACATCTTAATTTTTCAGCATTGCTATGGAGTAATAGGA |
| | | | | GTTCACTTTTAACTACCAAATATGTTTCTGTTATGATTTTTTAACATT |
| | | | | GTTCCTCATTTCTGATGCTTGTGTTGGTAGCCATGCTTTTCATGATAT |
| | | | | ACTAATTGCTATAGTTGTTTTAGTCTTTCCATTACTTTTACTTGTAAA |
| | | | | ATATATTAAGTGGTATATTAGTTTGTTGAGCTTGGTGAACCTCCATA |
| | | | | TTTTATTTATCTTTTATACCAAGTGCCCAGATTGTTTGTGGTTTATTAT |
| | | | | GGCTATGTTTTTTTTCCCATTGCATGGAAACCTTGGAGGCTTGAACA |
| | | | | GAATTCTAGTTTATGTACGGTAGTTTTGAAAAATGATGTGCGTTGAA |
| | | | | AGTGTAGTTGAAATTTCAAATCAAATGCACCTTTTGAAATTCCTAAA |
| | | | | GGCTAATTTATTGTTATTGGTTTAGGTGACTGGAGATCCAGGGAAG |
| | | | | ATGGTTGCTGTCGAGAGAAACTTAAGCAAGTTTGGAATTAGAGAAA |
| | | | | TTGCAAGAACTGGAAAGGTTGTGTTCAGTTTTCTTTTTATTGTGGCT |
| | | | | GTTTTGTAGGTTTTAGTTTGCCGTTGATTCGTGAGCCTGCTGTTCTG |
| | | | | AATAGATTGCATTGAGAAGGGAAAAAATGGGGGCTTGTGCTCCATT |
| | | | | TTGGCGATTTTCAGCTGCTTCATATCCCGATCTTGGAGAAACAATGT |
| | | | | CGAATAATTCTCTCTTGGAAACTAAAAGTTCAGCAATTGTAGGGGA |
| | | | | AGACACCACATCTTCAGGGGTATGTCAATGTCAAGTTTTTATTTTCTT |
| | | | | TGTTTGGTGTTTTTTCGAGACTATCTGAAAAATTACAACTTTATGAG |
| | | | | CAAATCCAGGGAGATGTGTATCCAGTGGAATCGTCTGATAGCTTTA |
| | | | | CCGTAACTCAAGTTCTCGATGCTCATTGGGGTGTCCTCAATGAGGA |
| | | | | AGATGTAGGTCTGCTTATTTTCAATTCCATCTTTTTTTTTCCGGTCTTA |
| | | | | TAGAGCGCACATTAATTTGTCGAGTATTTCAGACAACTGGACTTCGA |
| | | | | TCCCACACTCTATCTATGGTAGTAAATGACTCTCCTGGAGTTCTCAA |
| | | | | CATCGTGACAGGGGTATTTGCTCGAAGGGGCTATAACATTCAGGTA |
| | | | | TTTCTTATGACTTTCTTCTCTGGTTTGACCTTGTTTCCCTTAATCCTAG |
| | | | | AATGGATTGAAGAACAAATGATTTTCTCGTCTTTGGCGGCAGAGTTT |
| | | | | GGCAGTTGGGCATTCAGAAATTGAGGGGCGCTCACGAATTACAACT |
| | | | | GTGGTTCCTGGTACTGATGAATCAATTAGCAAGTTGGTGCAGCAAC |
| | | | | TTTACAAGCTAATAGAGCTCCACGAGGTCAGAAAACTTCACCAACA |
| | | | | AGTGTCAATTTTTTTGAGTAAATAATGTGTTTTGTGTTTTGATGTAAT |
| | | | | ATTCTATTGTTTTGAAACAAAATGCCTCTATTACCAATCTAATGTCTC |
| | | | | GGAGAAAAAAGAACTTTTTGGTCCCTGTGCTATAAACTTTTTGGCCA |
| | | | | TTTGGTCCATGTGGTATACACTTGACCTTTTTGCTCCCTATTCTATGC |
| | | | | AATATATTACCTTTTTGTCCAGATGTTTTCAATCATTATTCATTACCCA |
| | | | | TTTGGTCCATGTGCAATGCAATTTGTTTATCTTTGTGGACCTTGTTCG |
| | | | | ATAGAGACTTAATTAGTGATATGTCACATATTATGTACTAGAGGGA |
| | | | | CAAAAAAGGTAACAAATTGAATAGCACAGGGACTAAATAGGTAAC |
| | | | | ATGTATATCACCAAAAGGACAAACTGATGATACAACGAGGCTCGAA |
| | | | | AAGGTCTTTTTGCCAATATCTCAGCCTTTGAAGGTTGAATCTTGTATT |
| | | | | TGGTATATATATATATATTTATATAAAGGTCTTCAATCTTGTAAATGG |
| | | | | TGACTTGTCCAGGTTCGGGATCTTACCCACTTGCCATTTGCTGAACG |
| | | | | AGAGTTGATGCTGATAAAAATTGCGGTGAATGCTGCTGCACGGCGT |
| | | | | GATGTCCTCGACATTGCCAGCATATTCAGAGCAAGAGCCATTGATG |
| | | | | TATCGGACCACACAATAACTCTCGAGGTAATTTTCACATTATCTTGTC |
| | | | | ATTGTGTTTAGCCGACAATATGCTCAAACTTATCGCCTTTTTTCATCC |
| | | | | CTGGCTGATGATTTTGCTTTGAATTCTGTTTCCAGCTTACCGGAGAT |
| | | | | CTCGACAAGATGGTCGCATTGCAAAGGTTGTTGGAACCCTATGGCA |
| | | | | TTTGCGAGGTTTGTGGTTAAAACTGTCTCTTCCTTATGCCATAACATC |
| | | | | TTTTTAAAAATTATATCTTTAATTCTTTATCTTTTTATAGGTGGCAAG |
| | | | | AACAGGGCGAATAGCATTGGTTCGAGAGTCTGGTGTGGATTCTAAT |
| | | | | TATCTCCGTGGATACTCGTTTCCTATATAATAAATAGGCCACACTTGT |
| | | | | TATGGTAATCCCCGAGTTTAAACTGGCTTTTGGCTTTTGGCTTTTGTA |
| | | | | TCAGTGTTAACAGTTGAGTGCTCTAGACACATTGTTTTATTTCTTTTT |
| | | | | CATACACAAATAGTATTGAAGTTTTGTTTATAAATTTAAAAATGAAC |
| | | | | TTCACGGGTATTTATTTTTTTAGCAACTAATCGAAATAACTAAAATCC |
| | | | | GGAATCTACATAGAAAATGAGCAAACCAGAGAAGCCTGTCATATAT |
| | | | | ATAGAAGACAATCAACTATCAAGTAAATAACTACAAAATCAGTCTC |
| | | | | GGGCTACGACAACCAATTGTTTCCCGACATTATGGCCAGAAAATAT |
| | | | | CCCTATAAGAGCTTTTGGAGCTTCCTCGAGGCCTTCTGCTACATCTT |
| | | | | CTACATACACAAATTTTCCTTCCTTGATGTTAGGGATAACCAATTGTA |
| | | | | GGAATTTCGGGTAGAGGTGATAGAAATCACCAGCCAAGAATCCTTC |
| | | | | CATTCGAATTCGTTTCCCAATCACATTGCCTAGGTTATATATTCCTTC |
| | | | | GGGATTTTCAAGATTGTATTGAGAAATCATTCCACACACCGCAATTC |
| | | | | TACCTCGAACCCTCATGTTTAGGAGCACTGCGTCCAACATTTTCCCC |
| | | | | CCAACATTCTCAAAGTATATATCTATGCCTTCCGGAAAATACCTGCA |
| | | | | ATTCCAATACAAGACAATCAAAGCTATGAAGCACTTGGTTCAAATTC |
| | | | | AAACCATGGAAACTTGACAGAAAAAATAATAAATTTAAAAAATTTA |
| | | | | CCTTTTGAGTGCTGCATCCAAGTCAGGTTCTTCCTTGTAATTGAAAG |
| | | | | CCTCGTCATACCCGAACTTATTTTTCAGAAGATCAACCTGTAAGAAC |
| | | | | CAAGGAAAACGCAACTCAACAAAAACCTTTAGAAATGTTTACAAGT |
| | | | | TTTCAGGAGGTTGTTGTAAAATGCCAACATAATTCGTCCAACGGCCT |
| | | | | CTTTGAAAGACGATTTTGCCCTTATTTGCGTAATGAAAACCTGAATT |
| | | | | TTCACGGCGCATAAATTACCTTCTCTTTAGAGCCAGCGCTTCCAACA |
| | | | | ACATAGCAACCTGCCAGTTTTGCCAGTTGGCCAACAATCTGACCGAC |
| | | | | CGCACCAGAAGCAGCCGATACGTAGACATATTCTCCT |
| 1754 | Euphorbia | gDNA | 4073 | ATAGGATCTGATAAATTTCTGTTCCGTTGTTCATCAGAAGAATTTTTT |
| | heterophylla | Contig | | TTTTACTATGAGCTCAAATTAAGAAATAAAGCATAAATGTCAGGGTT |
| | | | | TTTATGTAAAAACAACTGAAATATACAACTTATGAAGGAGGGTTTG |
| | | | | TGATCTGTGTGTATGCCAGGTGATTGTCACTTAAGTAGTATAAAAGT |
| | | | | TCATAGCATGCAAAATCAAGACTACTATATGTTCTTTTTAAATGTGT |
| | | | | GTACTATGCTATGGCAAATAGCCTTGTAATGAAGCTTGAATTAGCAC |
| | | | | TAATATAGATTGCTCTAAGACGGGAAAGGATGGGCGAGACAGCGC |
| | | | | CGTTCTGGAGGTTTTCTGCAGCTTCCTATCCGGACCTTGAAAGTATG |
| | | | | CAACCTGGTGCAGTTGAAAATGTGCAACCTGCTGGTGCCTCACCCG |
| | | | | GTAGTCCTGCTACTAATTTTACAGAGAATTCAAATGGTTCCATTAAT |
| | | | | GGCAGAACCATCTCATCTTCAAAGGTTTATTATACTTTAATATATTAT |
| | | | | TTGGTCGATCTAATATCTTATTAGATATGTCCAATATTATTTGTGCAC |
| | | | | TACCATGCCTTGAATATGCCATGTCTTGAATGAAACTTTTAGTACAT |
| | | | | CTACATGGAGATGTGTACAATACTACTGATCTGAATTATTATTAATA |
| | | | | CACTAGATACAGTTAATCATCAGATAGCATCATGTGTTTAGTATCTT |
| | | | | CTGTAGAAAGATAAAGTGTGCTTGAATGAAGATAAATAATACCTTA |
| | | | | ATTGAATGGTTCGGAAGAAGAGCTTGCTGTTATTTGTCGAGGATAT |
| | | | | ATTTTTTCTATATTGTCTGCTTGTCTGTGTTCTGGGATGGCCATCCAT |
| | | | | TTGACTGCAAGTTATATTACCATGATGATCATGAATAAGGATCAAAT |
| | | | | AATATCCGGTTGCAACTATTCTCCCGTTTTTACTTTTAGGAAAGATAA |
| | | | | TTTAGTTGATATTTAAACCTTTCTGATGCAATAGTTGTCAAAAGCTCT |
| | | | | TATCCTGCTCAAGCCTCATTGCCACCTGCCAGGTTCCTCACATGCAA |
| | | | | AAGATCCGCACCTAGATGCTCTAGGCTTTTGGTGCTATAGGCTCTAG |
| | | | | GTGCTCTAGGCGTGCGCCTCACACCAAAATTAAGTTGTTTTTGGAAA |
| | | | | TATAACAATTTAGGTGAGTTTAGACTTTATGGTAAAAACATAATTAG |
| | | | | GAAATAGAAATTAAGAAAGAAAAATCCGGAAAGGAAAAATATTTTT |
| | | | | GTATGGAAAATATTAATTATGGAGGAACAAAAGTTAGGAAATGGA |
| | | | | ACAATAAAAATGAGGAAATTAGAGAAACTACGAAAAAAATTAAAAT |
| | | | | AAGGAAGAAAATAGAATTGAGTGAGAGAAATAGGTATGAAAAGAA |
| | | | | AAGAAAGACACTTGGATGTTGATTTCACAATCAGCTACTAAACTACT |
| | | | | AATAAGGCATTAAAATAACTATTTAGGTCCTTACACAATTTTTTAACT |
| | | | | GCAACGTATATATATACAGCAAATTTACGGTGCTTCTTAATTTTTTAG |
| | | | | CTATTGAAATTCAATTTATTTATAGTTCATTTACCCCCTTACGCCTAG |
| | | | | TATGCGCCTTAACAATTGATTTGTGTATATGGTTTCTTATTTTTACTC |
| | | | | TACAGAACTTGTATTCTAATTCCATTTGTTTAATGAACTTGAACTCAC |
| | | | | GTGTATGGCTAAATCTGTATGTTAATTTTCAATTTAATTTAGTTCTCC |
| | | | | TTTAACTTGTGTGTGTGATAATTTTGCATTATATTGTTACATTATTAA |
| | | | | AGGCTTACTTCTTGTTTATGCCTTCTCAATCTAAGGGTGACGTATATC |
| | | | | CTGTGGAGCCTTATGATGAATTCTCTGTGCATCAAGTTCTCGATGCT |
| | | | | CATTGGGGAGTTCTCTATGATGAAGATGTAAGACATGTTCAAAGTG |
| | | | | ATCAGTTTCTATATTGCTTCATCTTTCATTATCATGTTACTTTCCATGA |
| | | | | TTGAACATCACATGCTCTATTATTAAAAATAGGAAATTTTGTTGGCT |
| | | | | TTGTTTTCTGTAACTTAATTTGGAAGTTGTAATATAATTATTTTACGA |
| | | | | GGTAGGTATAATTAAGTGGATAGCATAGGCTATAGTTATCTCACCTT |
| | | | | TCATTCTCATATTGACTTTATATTTCCTTTGTTGTTTTCAATTCAGTCT |
| | | | | AGTGGACTTCGATCACATACGTTATCCATACTTGTGAATGATTCTCC |
| | | | | TGGTGTTCTCAACACGATTACCGGGGTTATGTCTCGGCGAGGTTAT |
| | | | | AACATCCAGGTCTGCATATTTCATGTTCATCTCTATTTTTCTTCCAAA |
| | | | | ATGTTTAGTGACTTGTCATTGTTGTTATTGTTTTTTTTCACTTTAATCT |
| | | | | ATTAGAGTCTTGCTGTGGGTCGAGCTGAGAGAGAGGGACTTTCTCG |
| | | | | CATTACAACTGTTATCCTTGGAAATGATGATACAGTTAGAAAGTTGG |
| | | | | TTCTGCAACTTCACAAGTTGATTGATATACATGAGGTAAGTGGTGGT |
| | | | | GAAATTAACTTTTTCCCTCATATTTGTAAGTGCATAATCAAGCAACAT |
| | | | | GTGACATTATAAGAAAGGGAAAACTAGGAAGAAAAATTTGACGAA |
| | | | | TACAGTGACTGGCTTTTATGATATCCAAGTTGAAACTGCAGTTTTCT |
| | | | | TGTGAGATAGTTTGAGCATTTTGTCCTATAAGGCTGTAACTGTTTGG |
| | | | | AAGAACCTGGAACAAATTTAAGCTTCAGTGTCGTACAATGTCATGG |
| | | | | TCTATATGTTTGCTAATGATTTATTCTTGAGGAGTAGGCATAATTTA |
| | | | | AAATATTATTGAAGTATAATCTTGTACCCATACTTTGGTGATCCGCC |
| | | | | CATGATAATTATACTTCATGTCATGCTTATTTTCTTTCCAAATAAAGA |
| | | | | ATCTAAAGTTTTATTATTTAACTATGGTGTATCTCCACAGAGTAATTT |
| | | | | GTGTGTGTGTGTGTGTCTTTTGTTTTTGACAAATTCATGACCCATTTG |
| | | | | AGTGAATGGATAACTATGGTGGGTGCTTGATTCAGGTACAAGATAT |
| | | | | TACACATTTGCCATTTGCAGAGCGAGAGTTAATGCTGATAAAGGTG |
| | | | | GCAGTCAATACTGCAGCCAGGAGAGATGTCCTAGATATTGCTAGCA |
| | | | | TATTTCGGGCCAAAGCTGTTGATGTGTCTGACCACACAATTACCCTA |
| | | | | GAGGTAGTGGCTTCCTATGCTTGAATGATTAGCTGGCTTGCTCTTTG |
| | | | | CTAATATAATTTCACAACTCAATAATGATCATGATTCACGAGCCAAT |
| | | | | ATCAGGCTATGCTCTTGAGTTCTCTCTATGTGTTTTTAGTGAAGTTG |
| | | | | AGTTATTTTGTTTGTTTGATCTTTTTTTATTATTGGCGTGGCAAGTTC |
| | | | | AAATCTATACCCTCTAACTGGCTTGAAATTTGAGTTCCCTTTTTTCTT |
| | | | | TGTGCTACGGCAGTTTATGCACGCAGTCACAATATATTCCGTTAGAT |
| | | | | GTCTAGTATAACTGTGTGAAGTTTGAAGTATTGATGATAGAATTGG |
| | | | | ATGGTATGTGATTTTGATTTTTCGACAATGCACTTCATATGGTAGCC |
| | | | | GGCCCCATTTAGCATGGGATATTAAGGGTTTGCTGTTGTTGTTGCAC |
| | | | | TTCCACCAAGGAAGAGCTTGATGCCTATTGATGCCTTTTTCTATCATC |
| | | | | TCCATCAGTAGCTGTTGTTGGTTTTCCAAATTTTATGACTTCACTGAT |
| | | | | TATGTTATCATTTGATAGCTTACTGGTGATTTAACAAAGATGGCGGC |
| | | | | CCTGCAGAAACTATTAGAGCCATATGGGATTTGTGAGGTCAGTCAT |
| | | | | TTCCTGCCAAGTTTCAACAAGTAAAGATGTTTGTTTGCCTATGTTTCT |
| | | | | CTAAACATTGACAATCTTTGTTTATTTTGTCAATTTCTGTTTTTATGTT |
| | | | | TACACCAGGTTCTTTATAGTATATATGTTCAGAACAGAAGTTTTTTA |
| | | | | AATCTGTTCCACTAACTTGGCATGTAAAGCTGGATGCCACTGTGAAC |
| | | | | TTTCAAAAGTTCCAACCCTTGAACTTGGCAAAAGTGTATCAGTTTGC |
| | | | | CCCCTCATTGCCATGCGTCAGCTTTTGATTGGAGAAAGGAAGTTCA |
| | | | | GAACAATGACATATTTGAAAACTCAAACCAATTAGAAGCTGACACG |
| | | | | TGGCATTGAGGGAGGGGGGGAAA |
| 1755 | Euphorbia | gDNA | 2403 | AAAATTAAAGAACTAATAAATGATAATAATGACGATTACAAACTAC |
| | heterophylla | Contig | | AAAAGTTTGAACAAACTAAATAATCAATTAAAAATACTAAAATTAAG |
| | | | | AAGGTAATTACTTCGTAAAAATTATAAATTTGGCTAAAATATTTTAA |
| | | | | ATTTTACTTGAGACTTGAGAATATAATTAATTAGTCGAAATTGGACC |
| | | | | TAAATAATAAAGAAAAACTACACTTAATAATCACTCATAATATAAAC |
| | | | | TCAACAAACACAAGGTCTCGAACATAACAATAATATAAACATTAAG |
| | | | | AATCTAATAAGTACTACATATTATACAAATTTATAAACTCTTTGCTTT |
| | | | | ATTCTTTTTTAATCTCTTCTGTCAAATATTTATTTTGCAATATATACTT |
| | | | | TTAAATTTTGTTAATTAATTTGGTTTGGTTTTTATCATGAAAACCGAA |
| | | | | AATTGAACCAAAACCAAACCAAAACCAAAGTATTAGAATTTTACAA |
| | | | | ATCAAAACCAAACCCTATAGATACATAAGAACAAACAATAAATATG |
| | | | | TTATATCCTAATAAATCGATTTGATTTTCTTATTGTTAAGATAAAAAA |
| | | | | TGCAAAATCACATATTACAAATCACAAGAGAAAAATAATAGAAGGA |
| | | | | AAAGAAAAGAAAACGCAAGAATGAACCCATATTCACGAACAACGA |
| | | | | TCTCTATTGAGAGAAAATGATAGCGAATTCTGGTTGAATGAGCTGC |
| | | | | AAGTAATCTTTCCTAATTTGTAGGTTCGCATATTTTGCTTAATTAGTT |
| | | | | TGTCAATTATTTTGTTTTAAAGACGCGTGTTTCTTTGTTTTCAATTAT |
| | | | | AAGTGCAATTTCATATTGTTTCCATTAAGGTGTAAGGTATGGTTACT |
| | | | | TTATTTTTTTTCAAAATAAATCATACTTTACCTCTTAACACAATTGGAT |
| | | | | CAAAATAGCAACCATTCATCTTATGGTGATAGAAACAACATAAAAAT |
| | | | | TACTTCGGATAACCATATAATTTCCCTTTCATTAATTATCAATTAATT |
| | | | | ATCGATGGTCAAAAGATCAATATCTAAGTTGTTTTATAAAAAATTTA |
| | | | | GGAGTTTTTAACAATTTGATGTACGAATGTTATATTTTGAAAATATT |
| | | | | ATTTAATTTTGTTAATCATTTCCCATTCTTCTCTGTTTCTCTTTAGCTCT |
| | | | | CAAATCTCTCCTTGGCACACTCTCAGTCTAATGGCCGCCGCAACAAT |
| | | | | TCAAACCTTCAAAACCTCTTCTTTCCCTTCCACATCTTCTGCTTCAATT |
| | | | | GCTTCTCTTGGCATAGCCAACTCCTCAATTACGATACCCCTCTCCAAA |
| | | | | TTCACTTCCAAGCATAATTTTTCCAAAAAATCTCTCAAGGTCTCTGCT |
| | | | | ACCGCTGCTGATGATGACGGAAAAATTTCCCATACCCCTTTCCCCAA |
| | | | | TAACGGCTCTCTCCCTCCAAGGCCCGTGTCAAAGTACGTTGCTCGCT |
| | | | | AATTCACTGCTTAAAGCTTGTTTCTTTTGAACTTATGTGATCATATAT |
| | | | | GGGCACTCTGCCATCTGGTTTAATTTGGGGGTTTTTCCTTTTGACGG |
| | | | | AATTTGAACATTTAAAATTGAGGGGTCATCAAATTAAGCTTTGGGAT |
| | | | | TTCTCAATTTCACATGTATTTTAGTGATTGTTCGTTATTGATTGATTA |
| | | | | TTGTTTGTTGCACATTGTGATGGGATTTAGGGTTAGGCGGCATACG |
| | | | | ATTTCTGTGTTTGTTGGAGATGAGAGTGGAATGATCAATCGCATTG |
| | | | | CTGGGGTTTTTGCGAGAAGGGGATATAACATTGAGTCCCTTGCTGT |
| | | | | GGGTCTTAATAAGGACAAGGCGCTTTTCACTATAGTTGTCTCTGGAA |
| | | | | CTGAAAGGGTGTTACAACAAGTTATGGAGCAGTTGCAGAAACTTGT |
| | | | | TAATGTTTTGAAGGTTGTATTCTTATTTCGAGGGAGTCCCTTTATCTA |
| | | | | CTGATTTTAGTTTTATAGTTATAATTGTTGGCACATAGTCCAGTTGAA |
| | | | | GAGAAATGGATACTGGATATATAGAAGAGACAGATTTCTATTTGCC |
| | | | | TATTTTCATATTATGGCTTTTGTTACATTGTTCGGATTGTAATTTCTCC |
| | | | | ATATGCTGTTGTTTACTATGATATTTAGGTTGAGGACCTATCGTCCG |
| | | | | AGCCACAGGTAGAACGTGAGCTAATGCTTATTAAACTGAAGGCAGA |
| | | | | TGCTAATAACCGTGCTGAGGTAACTGGATTTTCATCGTTGTTGAGTA |
| | | | | TGGAAATGCTTTGAGGATTCCAATTTGAATTGCTCCCTTGTTTTTCTC |
| | | | | GGCTACATTTTGTTCTTCGGTGTGATTTTCAGATTATGTGGTTGGTG |
| | | | | GACATCTTCAGAGCAAAAATAGTGGACATCTCTGAGCATTCAGTTA |
| | | | | CAATTGAGGTAAATGATTTGTTAATTGATTCCAATTCTAGAGATAAA |
| | | | | AAGATCCTAGTGGATGACCCCTCTGATACTTTAAAAATTAAAGA |
| 1756 | Euphorbia | gDNA | 1780 | TCTGATACTTTAAAAATTAAAGATTATTAATAGTTGTTTAATAATATT |
| | heterophylla | Contig | | GACAAATGAATGAACTGGAAATATTGAACATATTGTTGTTGAAAAG |
| | | | | TTGTGCATATTAATTATGAAGTTAAGTTTGATGCAAACTTGTAGCTA |
| | | | | ATCATTTTTCTAGTAATTTAGTTTCAATGATAGTATCAGTGTAATATA |
| | | | | TGATATGTGGAAATTTTTAAGGGCTTTAACATCTTAATTTTTCAGCAT |
| | | | | AGCTATGGAGTAATAGGAGTTCACTTTTAACTACCAAATATGTTTCT |
| | | | | GTTATGATTTTTTAACATTTTTCCTCATTTCTGATGCTTGTGTTGGTA |
| | | | | GCTATGCTTTTCATGATATACTAATTGCTATAGTTGTTTTAGTCTTTC |
| | | | | CATTACTTTTACTTGTAAAATATATTAAGTGGTATATTAGTTTGTTGA |
| | | | | GCTTGGTGAACCTCCATATTTTATTTATCTTTTATACCAAGTGCCCAG |
| | | | | ATTGTTTGTGGTTTATTATGGCTATGTTTTTTTTCCCATTGCATGGAA |
| | | | | ACCTTGGTGGCTTGAACAGAATTCTAGTTTATGTACGGTAGTTTTGA |
| | | | | AAAATGATGTGCGTTGAAAGTGTAGTTGAAATTTCAAATCAAATGC |
| | | | | ACCTTTTGAAATTCCTAAAGGCTAATTTATTGTTATTGGTTTAGGTGA |
| | | | | CTGGAGATCCAGGGAAGATGGTTGCTGTCGAGAGAAACTTAAGCA |
| | | | | AGTTTGGAATTAGAGAAATTGCAAGAACTGGAAAGGTTGTGTTCAG |
| | | | | TTTTCTTTTTATTGTGGCTGTTTTGTAGGTTTTAGTTTGCCGTTGATTC |
| | | | | GTGAGCCTGCTGTTCTGAATAGATTGCATTGAGAAGGGAAAAAATG |
| | | | | GGGGCTTGTGCTCCATTTTGGCGATTTTCAGCTGCTTCATATCCCGA |
| | | | | TCTTGGAGAAACAATGTCGAATAATTCTCTCTTGGAAACTAAAAGTT |
| | | | | CAGCAATTGTAGGGGAAGACACCACATCTTCAGGGGTATGCCAATT |
| | | | | TCAAGTTTTAATTTTGTCTGTTTGGTGCTTTTTAGAGACTATCCCTGA |
| | | | | ACATTTACAACTTTATGAGCAAATCCAGGGGGATGTATATCCAGTG |
| | | | | GAACCGTCTGACAGCTTTACCGTAACTCAAGTTCTCGATGCTCATTG |
| | | | | GGGTGTCCTCAATGAGGAAGATGTAGGTCTGCTTATTTTCAATTCCA |
| | | | | TCTTTTTTTTTCCGGTCTTATAGAGCGCACATTAATTTGTCGAGTATT |
| | | | | TCAGACAACTGGACTTCGATCCCACACTCTATCTATGGTAGTAAATG |
| | | | | ACTCTCCTGGAGTTCTCAACATCGTGACAGGGGTATTTGCTCGAAG |
| | | | | GGGCTATAACATTCAGGTATTTCTGATGACTTTCTTCTCTGGTTTGAC |
| | | | | CTTGTTTCCCTTAATCCTAGAATGGATTGAAGAACAAATGATTTTCTC |
| | | | | GTCTTTGGCGGCAGAGTTTGGCAGTTGGGCATTCAGAAATTGAGGG |
| | | | | GCGTTCACGAATTACAACTGTGGTTCCTGGTACTGATGAATCCATTA |
| | | | | GCAAGTTGGTGCAGCAACTTTACAAGCTAATAGAGCTCCACGAGGT |
| | | | | CAGAAAACTTCACCAACAAGTGTCAATTTTTTTGAGTAAATAATGTG |
| | | | | TTTTGTGTTTTGATGTAATATTCTATTGTTTTGAAACAAAACGCCTCT |
| | | | | ATTACCAATCTAATGTCTCGGAGAAAAAAGAACTTTTTGGTCCCTGT |
| | | | | GCTATAAACTTTTTGGCCATTTGGTCCATGTGGTATACACTTGACCTT |
| | | | | TTTGCTCCCTATTCTATGCAATATATTACCTTTTT |
| 1757 | Euphorbia | gDNA | 666 | GGGGAATTTGGAATCCCACATTGCGTGGCTATGAGCATAAAATGCC |
| | heterophylla | Contig | | TCCTACATTGATGAACAATCCTGACCCCATAGAATACCTTTTTGGGT |
| | | | | AATATATGGATGCTTGCAGGCTTATATCCCTTTCTTCAAAGCAATTTA |
| | | | | AAAACTAATATGTATGCTTTTGTTGCTTTAAATATTGGATCATTATGT |
| | | | | AATTAGCTATAAATTCCAGATTATGTGGCTGTTGGATGTCTTCAGAG |
| | | | | CTAAAGTTGTTGATACCTCAGAGCATACAATGACTATTGAGGTAATT |
| | | | | TTAAGTATTACGTATCATATCCTTTATCTGTACGTCTAATGGCTGTGA |
| | | | | AGATTCATGTAGGATTGGATTTAAAATTGAAAGGTCGAATATGGGA |
| | | | | GTTTTTCCTTTGGTTTGTGGCTTTGTGCCTTTCAACATCATAACTTTTT |
| | | | | ATGAGGTTTTTATTGTTCATCAATTTATCATATGATTGCAATGGGTCT |
| | | | | TAAGGTGAACCTTATCAGAAAATTGCTTAAGCAAAATATCTTGCAGT |
| | | | | TTATAATTGAACTAGTTCACTTGATGGTTTGGAGTCAAAGGGTTATT |
| | | | | TTGACTTAAAAACAGTAATGGTTCACTCGAATCCAGCGACGTGCTTC |
| | | | | TTTCTATTTATAGGAATGTTTATTTTTTTTGGTAGAGGACGTTTTCAA |
| | | | | TTC |
| 1758 | Euphorbia | gDNA | 351 | ATTTTGCTTTGAATTCTGTTTCCAGCTTACCGGAGATCTCGACAAGA |
| | heterophylla | Contig | | TGGTCGCATTGCAAAGGTTGTTGGAACCCTATGGCATTTGCGAGGT |
| | | | | TTGTGGTTAAAACTGTCTTTTCCTTATGCCATAACATCTTTTTAAAAA |
| | | | | TTATATCTTTAATTCTTTATCTTTTTATAGGTGGCAAGAACAGGGCG |
| | | | | AATAGCATTGGTTCGAGAGTCAGGTGTGGATTCTAATTATCTCCGTG |
| | | | | GATACTCGTTTCCTAAATAATAAATAAGCCACACTTGTTATGGTAAT |
| | | | | CCCCGAGTTTAAACTGGCTTTTGGCTTTTGTATCAGTGTTAACAGTT |
| | | | | GAGTGCTCTAGACACATTGTTT |
| 1759 | Euphorbia | gDNA | 318 | GAAAAATTGTTTGTGCTCAATAGGTGGAAGATATCTCTAAGGAACC |
| | heterophylla | Contig | | ACATGTGGAACGTGAACTGATGCTTATAAAACTTAATGTGGATCTA |
| | | | | GAAACTCGTCCCGAGGTAATCTTGTAGTATTTAGTTTGTCTCTTTTCT |
| | | | | TTCATTTATTATTTTGTAAGCCTTAGTTTTGTTGTATGATATTGACAA |
| | | | | TCTTCTGCAAATTTCTGCAACATATTGCGAAAACAACACTACAGGCT |
| | | | | CTTTTGAATTTGTTATGCATGCAAAATGTTTGATTTGGTCTACCTGCT |
| | | | | TCCAATCAATAGTTAATATGCATTCACAATTTATG |
| 1760 | Commelina | cDNA | 591 | ATTAAGTCTACAGCTGGATCATTCAATGGGAACACAGAACAATCAT |
| | diffusa | Contig | | CTGGAGGAGATGTTTATCCAGTGGAACCTTACGAAGGCTTTGTTTTC |
| | | | | AATCAAGTTCTTGATGCTCATTGGGGTGTTCTCGACGATGAAGATTC |
| | | | | GAGTGGCCTGCGTTCACACACATTGTCCATTGTTGTAAGTGATATTC |
| | | | | CCGGTGTCCTCAACATTGTAACTGGGGTGTTTGCTCGTAGGGGCTA |
| | | | | TAACATTCAGAGCCTTGCTGTTGGCCCAGCTGAAAAGGAAAATGTC |
| | | | | TCTCGTATTACTACTGTAGTCCCGGGAACAGATGAATCTATCGGCAA |
| | | | | GCTAGTTCAGCACCTTTACAAGCTTATCGATGTTCACGAGGTTCATG |
| | | | | ATATAACTCATTTGCCGTTCTCTGAAAGAGAGTTGATGCTTATAAAA |
| | | | | GTTGCTGTGAACACTGATGCTAGACGGGATATCCTAGACATTGCTA |
| | | | | ATGTTTTCCGGGCAAAAGCTGTTGATGTTTCTGATCATACAGTCACA |
| | | | | CTTGAGCTTACTGGAGACTTCGAGAAGTTGGTTGCATTACAGAAAC |
| | | | | TGTTGGAGCCTTATGGCATCTGTGAGGCGGCG |
| 1761 | Commelina | gDNA | 760 | CTAGAAGTTTATAAACATCACCTTGGCAATTTTTATCGTGACAAACT |
| | diffusa | Contig | | TCTTGTTTATTTATTTGGTTTTGCTTTGATTAAGTTGGTATTCAGCTA |
| | | | | GGAGTAACAGATTGCCAAATTGTAGAAATGCATTTTTTTTAATACCA |
| | | | | AACATTGGATATATAGGAAAGTTTTGAATATTCTTTCGTTTTAAGTT |
| | | | | AGTATGTTGGTTCTTTCTTTATTAGAGCCCTTTTAGTGCATTTCTCTC |
| | | | | GAAATTCTTATGAGATAATTGAGTTCTGTGTAACTGTAGAATAAGG |
| | | | | AGACACACTATATCTGTTTTTGTTGGAGATGAGAGCGGAATCATAA |
| | | | | ATCGGATAGCTGGTGTGTTTGCAAGAAGGGGATTCAACATTGAATC |
| | | | | ACTTGCAGTTGGTTTAAATAAGGACAAGGCACTATTTACTGTAGTTG |
| | | | | TGTCTGGGACTGAGAAAGTGTTACAGCAGGTTGTGGAGCAGCTAA |
| | | | | ATAAGCTCATTAGTGTTTTGAAGGTAAGTTGACAATTTCTGATTATT |
| | | | | GGTTAGAGTGCTCTGTGTTGATTTATAAGGATGTATTTATATTTATTT |
| | | | | GCACATGCTGTGGATTAGGTTGAGGATTTGTCCAAGGAGCCTCAGG |
| | | | | TTGAACGAGAGTTGATGCTTATAAAACTCAACGTTAACCCAGATGA |
| | | | | GCGCCAAGAGGTATGTACTATTGTATATCACTTTACAATTTGGTATT |
| | | | | TCACTTCTTGGAGTTCTAAATTTCCGGAGAATTGGCGAGTCTAGTAA |
| | | | | CTATTGGGCCAA |
| 1762 | Commelina | gDNA | 374 | TTATAACACTGTTAGTTGCCAAAACTTCTAGAACTAAACTTTTTACCT |
| | diffusa | Contig | | GCTATATGGATTACACTAGTAAATGACATAATGCTATCGCTTCTGGT |
| | | | | AAACCGTCTCGCAACTTGTCAATCACTTCATGAAATTTGACACCTTCT |
| | | | | ATTATGTAGTATCAACCATAATTTTGTGGTAATATTGCTTCTAATGTG |
| | | | | TTGCAGGTGGCGCGAACTGGCCGAGTTGCACTAGTTCGTGAGTCGA |
| | | | | GAGTTGACTCTAAATATCTGCGCTATGGCTATGCTCTTCCATTATGA |
| | | | | GCAACTTCAAAAACTGCACATAACCAGTGAGACCGGTAAAGATAAT |
| | | | | GCTCCTTCCTCAACTCATTTCCTAAATAAGTCAATCCCGTCTTT |
| 1763 | Commelina | gDNA | 310 | CACTCATAACTTTGGATTTTGATAATCTGATTTTTCTGTAGATTGCTT |
| | diffusa | Contig | | TGAGACGTGAGAAGATGGGCGCAACTGCACCCTTTTGGCGGTTCTC |
| | | | | AGCTGCTTCATATCCAGATCTTGAAGCCTCAGTGCCAGTTAGTACTC |
| | | | | CTATTAAGTCTACAGCTGGATCATTCAATGGGAACACAGAACAATC |
| | | | | ATCTGGAGTAAGTACTTGATTCATGTATGAATATATAATGTAACTGG |
| | | | | TTGAAAATAGAATTTTTATTGATTGTTTTGATGTGCGTGATTCTTTTT |
| | | | | CAAGCATCTGAGTTTGTAAGAGTGAGAA |
| 1764 | Commelina | gDNA | 288 | CATTCATGTATTTGCCCTACTGTCAATTTGCAGGTCATGGCTCTGGT |
| | diffusa | Contig | | CGATATTTTTAGGGCAAAAGTAGTTGACATTTCAGACGAGACTCTG |
| | | | | ACCATTGAGGTCATATCTATCTAAAAATCGTTTTCTTCTAAGAAAGT |
| | | | | GAACGTTAATTATCTTAGCTCTCCAGTCATGAGTCAATTCTTCTTCAG |
| | | | | CTGAGATCTTGGTCAACGTGCAGGTTACAGGAGATCCAGGGAAAAT |
| | | | | GGTTGCAGTTCAGAGGATCATGAACAAGTTTGGAAACAAAAGTTGA |
| | | | | AATATGAA |
| 1765 | Commelina | gDNA | 255 | TCATCAGTACTCTATTCGTACATGCATCTCTTGTACACTGCATATATC |
| | diffusa | Contig | | CTTTGATTTTCATTTTTATTGCTGCTAGGCTTGATTATAATTTAGATC |
| | | | | CCTCATTTTTTGTGGTTAAGGGAGATGTTTATCCAGTGGAACCTTAC |
| | | | | GAAGGCTTTGTTTTCAATCAAGTTCTTGATGCTCATTGGGGTGTTCT |
| | | | | CGACGATGAAGATGTAAGTTTCTGTACTATCATGTTTTAGTTTTCTTT |
| | | | | CCTTTGCTGTGAATGAT |
| 1766 | Commelina | gDNA | 210 | AGTCCCGGGAACAGATGAATCTATCGGCAAGCTAGTTCAGCACCTT |
| | diffusa | Contig | | TACAAGCTTATCGATGTTCACGAGGTCAATTGAGCTTTACATTCAGC |
| | | | | CATATTCTTCTACCGATTCTTGTATCTGAACATATGATGCATTCAGGT |
| | | | | TCATGATATAACTCATTTGCCGTTCTCTGAAAGAGAGTTGATGCTTA |
| | | | | TAAAAGTTGCTGTGAACACTGA |
| 1767 | Digitaria | cDNA | 569 | TGATAAATCGGATTGCAGGAGTTTTTGCAAGGAGGGGATATAATAT |
| | sanguinalis | Contig | | CGAGTCCCTTGCTGTTGGTTTAAACAAGGATAAAGCTCTTTTTACTA |
| | | | | TAGTTGTATCGGGAACTGAAAGAGTGTTGGAGCAAGTCATGAAAC |
| | | | | AACTTCTAAAGCTCGTTAATGTTTTAAAGGTTGAAGATATATCAAAG |
| | | | | GAGCCACAAGTAGAACGTGAGTTGATGCTCATCAAGATAAATGCTG |
| | | | | ATCCAAGATACCGTTTAGAGGTCAAGTGGTTAGTGGACATATTTAG |
| | | | | AGCTAGAATTGTTGATATTTCAGAGCACTCTATAACTATTGAGGTTA |
| | | | | CTGGTGACCCAGGGAAAATGGTTGCGGTGCAAAGAAATTTAAGCA |
| | | | | AGTTTGGGATCAAAGAAGTTGCTAGGACCGGGAAGATTGCCTTGA |
| | | | | GAAGAGAAAGAATGGGTGAAGATGCTCCTTTCTGGCGGTTTTCAGC |
| | | | | AGCTTCATATCCTGACCTTGAAGAAATGAACAAAAGAACTCCTCTTC |
| | | | | AAGCCAAAAAGAGAATGGAGTATCAGGAATCTGATAAGCCTGCTG |
| | | | | GGGGAGATGTTTATCCA |
| 1768 | Digitaria | gDNA | 5819 | GTGCTTGCCCCCCGTCGTCCCGCGCCAGCTGCGCCGTCGCCGCGGC |
| | sanguinalis | Contig | | GGCGTCGTCTTCGGGCGCTGGAGGCGGCGAGGCGGCCTCCGCGGT |
| | | | | CACGGCGGTCGCCCCCGCGGCCGCCGGCAGGGACAAGTAAGCGCT |
| | | | | CTCCCTCCCCACCCCGCCGAAAGTGTGGCGTCGTTTTTTATAATTTCT |
| | | | | CGCGGGGCGAGGTGGTGGCGCGGTTACTGTTCGTGGACCCTCACT |
| | | | | CCGCTTTTTTCCCAAATATTTTGTTTTTCCCTCCTCATGACGGGGCTG |
| | | | | GTCGGGCTTCTGGCGGCAAATGCAGGGTGCGGCGCCACACGATTTC |
| | | | | GGTGTTCGTCGGGGACGAGAGCGGCATGATCAACCGGATCGCCGG |
| | | | | GGTCTTCGCCAGGAGAGGGTACAACATTGAGTCCCTCGCCGTGGGT |
| | | | | CTCAACAAGGACAAGGCCCTCTTCACCATTGTCGTCTCCGGGACTGA |
| | | | | TAAAGTGCTCAACCAAGTCATCGAACAGCTCAATAAGCTTGTCAAT |
| | | | | GTCCACAGCGTGAGTTGGCCACACTAAAATTTCAGCAAAGTCGTGT |
| | | | | GAATTCGTACTTGATTACTTGAATTTCCCCTTTAAATTGGTAGCTGGT |
| | | | | GGCATTTCACTAATGCATTGAGATTTTTGTTTTATGTGTTTTACCTTG |
| | | | | CTGAATGCCCTTCCCCCTTTTAGTCTGTTAAGATAATTTCCACTTTTG |
| | | | | TGGAGCATCTTTTGTATATATAGAGTAGTACACAAAACCTTTTGCTT |
| | | | | TTCTGATTCGTCCATAATCCTTGTTTTCTTTTTTGGTATTCTGTTGCTT |
| | | | | TTCCCCATAGAATCACTGCTTGACAGTCATGTCAACATCAGGGACAT |
| | | | | ACTTCTTTCTAGGTGATACCTCAAATGTGTGTTGATACTATATATGCA |
| | | | | CTGTCATACACTTTCTTTGGGTGCACATACACTCCTTTGTCTTTTCTA |
| | | | | GGTGACGCCTCAAATGTGCATGTTATTATTCTGGCTGTGTAATGCCT |
| | | | | CAGAACTCAACAGTGACATTGTCGTATCATGTTTCCTTGGTTAATCA |
| | | | | TCGCCAAAAAATGACTTTGTTATTTTGACCATACAGTAGCTAATTAG |
| | | | | CTCTAATGCTATCCTGTTGAAAAGTCTATCTATAAATATAGAGCACC |
| | | | | CTTTTGGTTACAAGTGGGATGTTTCTGAATTTTCTTGTCTCTTTGCAG |
| | | | | TGTTGATCTCTTAGGGAAAAGTCTCTGAAAAAAATACTATGCAGAT |
| | | | | ATTAAATAGCTTAGGTAAATGTGCTTCATGGATCATCATTACTGCAC |
| | | | | TGTTTGTCTCAAGTCTCAACTCTCAACTACCGTTTAGATGGGCTTTAA |
| | | | | TATTTGTACTATTTTATTTTTCAAAAAATATTTACTACTATTGATATGT |
| | | | | TGCAATAAGAGTAATACCAGTAAATATTTATTATTTTTTGTGTCGAC |
| | | | | CCAATTAATTACAGGTCGAAGATCTATCTAAAGAACCTCAGGTTGA |
| | | | | AAGAGAGCTGATGCTTATAAAATTAAACGTTGAACCTGATCAACGG |
| | | | | CCTGAGGTATGTTATGGTGTTCACTAAGTGTTTGTAATCCAAAAGTT |
| | | | | GAATAGCATCCTGTATTTATGATACTAAATTACATGGTGAGTCTTAC |
| | | | | TGCAGTGCTTCTTTTCATGACTGACAGGTCATGGTTTTAGTTGATAT |
| | | | | TTTCAGAGCAAAAGTTGTTGATATATCTGATAACACACTTACAATTG |
| | | | | AGGTAAAAAAAACTCAAATCTCTAACTGGTGCACATATGTTAATTG |
| | | | | GTATCACTTTTCATGCGATGAACTATGTGTTTGATGGTTATTTGACC |
| | | | | ACTGTTAGGTAGCCGGAGATCCTGGAAAAATTGCTGCAGTCCAGAG |
| | | | | GAACCTAAGGAAATTTGGAATCAAAGAAATTTGCCGAACGGGAAA |
| | | | | GGTAATTTCTGAATATTCTTTCCTTACATGGATATGAATATTTTTTCG |
| | | | | TAGTACTAATTTTTAATGCTCCACCTTCTTAGATTGCTTTGAGACGTG |
| | | | | AAAAGATTGGTGCAACTGCACGTTTCTGGCGATTTTCTGCTGCTTCT |
| | | | | TATCCGGACCTTATTGAGGCACTGCCTAAACAACCACTTACATCTGT |
| | | | | AAATGGGAGAGTTAATGGCAGTTTCGAGCAACCATCCAATGCTGGG |
| | | | | GTATGTTCCCTTTGCCTTTTCCCTTTTTATTATGACCTGCTCTGTTTAT |
| | | | | AATTCACAACACTTAGTTATGGTGAGAGGATGCTTCTTTATTTCTTG |
| | | | | AACGATGCATATAAGCAATTTGAGGTGGATAAATTAAATAAAAACC |
| | | | | TGTAATGTCAGTAATACCTTTTCAGCTAACCAAATGTAGTTAATACC |
| | | | | TTTTCAGCTAACCAAATGTAGTTGAACTTCTATGTTAAGATAAAAGT |
| | | | | GCCAATAATTACCTATTGTGTTTAAGCAATTATCTGCAATGATGCAG |
| | | | | GGATATTAGTTCACTAAACCTAATGTGTTTGAAAAATAATTAACTTG |
| | | | | TCTTGTGAGGGGTTTGGGTCACTTCACCAAACATTTTTGCCAGTGCA |
| | | | | TGATACTACTTTTAGAAGTCAGAGTGCACTATAACAGTGCTTTTATG |
| | | | | AGTTATAAAGCAGTAATTGAAGGTACATATTTCATATTTGCATGCAT |
| | | | | AAACAGCTCTCCTAATGGACGAGTCATTACACAACTGGTATGTCAA |
| | | | | ACTTGTGCATATCTTCTATTATGCTAATGAGGGAACATATTGTTGGG |
| | | | | TGTTGCCCACCATAGTGCACAAACTTACATAAACAGCATTCCTAATG |
| | | | | GGTGAATCATGCAGTCCTAGCCATATTTCACACTTGCCGTGAAACTT |
| | | | | GGACTAATGCTAAATTGCTAATATCATTAATGAAATTGTGCAGCCAT |
| | | | | TGAATTTGTGTGATGCAGTATTACAATCTAGAGACTTCTATAACATG |
| | | | | TGATGTTTTGACCTTTGAACTGTTCAGGGTGATGTTTATCCTGTGGA |
| | | | | ACCTTATGAGAGCTCATCACTGAACCAAGTACTTGATGCCCATTGGG |
| | | | | GTGTTCTTGATGATGATGATGTAAGTTTATAGATTTCCATCGTGGGA |
| | | | | TTGTGGTTAGTGCTATATGGACTGTATTGTTGTAAGCATAATTGCAC |
| | | | | CCTGAATCTAATTCTAATGTGACTGGAGTGAGTTCTCATTTAATACTT |
| | | | | TCATAATGTTTGCAAGAAGTCAATTGTAGGCCGCCTATATAACTTTA |
| | | | | AGCAATGGTACTGCCTAATCTGCATGGTACTAAACTGGTACTGATTT |
| | | | | TGTTTGTTACAGTCAACTGGACTACGCTCACATACCCTCTCCATCCTT |
| | | | | GTGAACGATTGTCCTGGTGTCCTCAACATTGTCACAGGGGTCTTTGC |
| | | | | TCGCAGGGGCTACAATATACAGGTTTTCCTTATTGAAAAACTATCTT |
| | | | | TCTTCTTGTGAAATATAGTGCCTGGGTAGTTATTAATGACAGTTACT |
| | | | | TCTCATCAGAGCCTTGCTGTTGGCCCAGCTGAGAAGGAAGGCATTT |
| | | | | CACGCATTACAACTGTTGTTCCTGGTACTGATGAATCCATTGAGAAG |
| | | | | TTAGTTCAGCAGCTTTACAAGCTTATTGATGTGCATGAGGTAAGCA |
| | | | | GCATGTGACTTTATGAAACTCATTTTTTATTGCAATTTTATTATTTAA |
| | | | | CATAAGCATCTAAATTGTGCAGGTTCATGACATCACTCACTCACCTT |
| | | | | TTTCTGAAAGGGAGCTGATGCTTATTAAGGTTTCTGTAAACACTGCT |
| | | | | GCTCGGAGGGAAATCCTAGATATTGCTGAAATCTTCCGAGCAAAAC |
| | | | | CTGTTGATGTTTCTGACCACACAGTTACACTACAGGTTAGCTTCCTA |
| | | | | ACAATTTTGTCTCTCCTGGATTTACTTCAGTGTCTGTCCGAACACTGA |
| | | | | TCATAGCAGAGCCAGTTGTGATACAAGTTTTGTGCACAATCAAAAA |
| | | | | ATTAGATCATGGTGTTCTTTTACTTTTTTCAGCATAGCACTCTTGTAG |
| | | | | TAACAGTAACATTACCATATAAAAACACTGTGATGCCAATGACATTA |
| | | | | CTATTCTTCACCCTGCTTTATCTCACTCCTTCCAAGCTATTGGCGTATT |
| | | | | GCAAAACTCTTACATAATGGAGTTCTTATTGGTAATTTGCAGCTCAC |
| | | | | TGGTGATCTTAACAAGATGGTTGCATTGCAACGGTTATTGGAGCCTT |
| | | | | ATGGCATCTGTGAAGTATGTGTGCTTCTTATACAGTCACTGTCTGTT |
| | | | | ACTTTATTGTTTTTCTTATGTAGTTATTATGAAACAGACATTCCTTTC |
| | | | | ACAGTTTCACTAACTAGTTGTGAAACATAATCTAACTACTGTAATAA |
| | | | | TGTCGATCAAAGCATTATGCACAACATTGCACATGGCTAGCCCTTAG |
| | | | | GCCTTAGCAGTTAGAGAAAAAGGAAAATCTTGTAGCAGCTACTAAA |
| | | | | GGATTCCCAATCAGTTGCACACCTGTTTTATCTTTAGGCCTCCTCCAA |
| | | | | TGGACCGACTCTTAGCTAGCTCATAAATATTTTATTCGATGAACAAT |
| | | | | GCTCGCTAGCTCTTAGTTAAGAGATCAGCTCTTAGCCCAACCCCCTC |
| | | | | ACATGCATGTTTTTCCAAGCTCTTGTTCTACTGTGTCGAGCTCTAAG |
| | | | | AGCTAGCTAGTTGGCTCTTGCCATTAAAGGAGGCCTTGGATTGATA |
| | | | | CATTTGCTTTCCTTTTCTCTGCAAAGCAATTGCTCTTTCCTCACCGTTG |
| | | | | TGTTGCACTCATGACAGGTTGCCAGAACAGGTCGTGTGGCTCTGGT |
| | | | | CCGCGAATCCGGAGTGGATTCCACGTACCTCCGGGGCTACCCCCTC |
| | | | | CCATTGTAGCCTGGCGTTTGTGATGATGGCCCAGGAAAGGCGTGCC |
| | | | | TGGTTGCTAGAGCAGAATGTGTAGGCGTCCCTTGTTCGGTTGTGTG |
| | | | | TATTTGCTGGACTTGTTTGTTTCATGTTCGTCGACTCCTTGATTCGCT |
| | | | | TGCTTAATAATATGCTCCTTGGTGGATGCAAGCTGAGGTTGCATTTG |
| | | | | TATCCCGTTGACAGTAATAATAAGATGTATGTGCATCCTCGTAGTTC |
| | | | | AGTTGCCAGTCTTCAGTTGGGAGAGATGTAGCCAGCCACCGTCCAA |
| | | | | AATTAACTGGCCCGCGGCCCGCACCTTCCTATTATTCCTTCTGTCTG |
| | | | | GTGTTTTTAGCCGGGAGAAATTGTACATCTGGAGAAGGGACATGGC |
| | | | | TGCTCCGGGCTCTGGCTAGCAGCGTGTGCAGCCAGGAAGCTGTTGG |
| | | | | TAAGGGCGTCCACCATGGGAGGCAAAACCAGTCCATAGTGACTAA |
| | | | | AATATTTCATTCAACCTAGCTGACACATTGTGGAAGTAGTCCATATA |
| | | | | GTAGTCCATAGTAAAAGGTACCTATAAGCTTATGGGCTGCCCATAT |
| | | | | GAAATAAAAAAAAACAATTTCTCTCTCACATACCTCTCATCTCTCTTC |
| | | | | CTTTTCCTCTCACCACTACTGCCTACTTTTGGATGACCATTGTGAAGT |
| | | | | TTGCAATAGTTATGAAGTTTACAATAGTTATAGAGCACTTTCGTAAG |
| | | | | GTTCCACCACTATGAATTACTTAGTCCGAAAGAGGCTGCGGCATGC |
| | | | | CGCCGATTCGTTTTTGACCGTTCTATAGACTGCGTCTTGCGAGTCTC |
| | | | | CATGGCCCGAGACCTCTGTGTGGCCAATAGATCGATGGGCATGGG |
| | | | | GCTGGCTCCTGGCGTACACGCAACGACTGCATTTGCGGAGACGCGG |
| | | | | CGCATGCGTCGTGCGTGATCACGACGAGAAAGGAGACGAAACGAA |
| | | | | CGAGAGCGTGGGCCGAGAGACTTCGCCCGCCATCGCTTTTGGGCTT |
| | | | | AAAAGGAAGAGCCCAGTGGCCCACTACAGATCGGACGATGAGGAC |
| | | | | GACGGCGTGGCATGGCATCCGCCCATCCGGTATTCCGGCAGGAAG |
| | | | | GTACGGGAAGAATCGGACTCTCGCCTTCGACGACCAGGGCGGGCG |
| | | | | CCGATCCGAATC |
| 1769 | Digitaria | gDNA | 5263 | TTTTAATACATTATGATGTGGCAAATTTTTAAATCTTTGGTATTCACT |
| | sanguinalis | Contig | | TCAGAAAAATAATGTGTAAGCTGCCAAAAATAGGGAATGTTTCTAT |
| | | | | TGTACATTGTTAACATGTGTTAGCAACTGTCATCAGTGATCCTGTTC |
| | | | | GAAAACATGTGGCAATCAGTTTTATTGCCTTAGTGGGGATCTTTATG |
| | | | | TTGGAGAAAGTATTTTATTTTAGCTCATATAAATCATAAAAAGTGAG |
| | | | | AAACTTTCAAAATCAGGTAACTGTCAGGACAAAAAACATTTTATTTT |
| | | | | TTTATATTAAAAACAAGCAATCTTCCATATATGTTGATTTTGTACTAA |
| | | | | GGTTGTGAACCAAAACACAACTTCAAATCTGTCCACATTATCAGGTT |
| | | | | CGTTTTTGTCAATATAAAAGTAACTATTCTTTTTGTCACATACTATGC |
| | | | | CCTGTAGTGGTGTCCAGGAACTTAGGGAATCAGTAATTACTGCATG |
| | | | | TCCATACAGCAAAGTAGCATTCTTATTTTGTAAGATCTGTAAATCGT |
| | | | | TCCATACTGATACTGTAGCAAAACGTTATTAATTGTTCCCCTAGTAA |
| | | | | GTAATTATTAACACTTTCCCTTTTTAATTTATAGGGTTGTAAAGCGTC |
| | | | | ACACACTATCAGTTTTTGTTGGTGATGAAAGTGGGATGATCAATCG |
| | | | | AATTGCTGGGGTTTTTGCTAGAAGAGGATATAACATCGAGTCATTG |
| | | | | GCTGTTGGGCTAAACAAGGATAAAGCATTATTTACAATAGTAGTGT |
| | | | | CAGGAACAGACAAAGTATTGAACCAAGTTGTAGAGCAACTAAACAA |
| | | | | ACTTGTTAATGTTATAAAGGTCAGTATTTTTTCCTCTTAACATGTGGC |
| | | | | TTACAAAAATGATTAGTATGTCACAGAAGTCATCACTCTTTGTCTTG |
| | | | | TACTGAGACTGTTGAACATAGTATCTTATATTCACATCTTAACATTTG |
| | | | | GATTAATAAACAGGTTGTTGACTTATCAAATGTACCACAAGTTGAAA |
| | | | | GAGAACTGATGCTTATAAAAATAAATGCGGAGCGAGAGAAGCTGC |
| | | | | CTGAGGTATAATCATACATATCTTTCAAAACGTATCTGTTCTGACCTT |
| | | | | GTAACCTTAAGAATGAATATTGGATATTACGTTTGTAGAAAGAAAT |
| | | | | ATATAAATTGATAACAAAGATATCAGAAATCAGGTCTGTTGGTGCA |
| | | | | AACTAGCACATTAAACTTCATTGTTGGGGTAACATCTATAGTTGTGA |
| | | | | ATGCAGATAATTGTTTTGGCTCGCATTTTCAAAGCAGAAGTGGTTGA |
| | | | | TCTTTCAGACGATACACTAACTTTGGAGGTAATGTCGTTGTTGTGCC |
| | | | | TTGACTCAAAGATAACTCAATTTATCGTTCTTATGGTTCTTTCTTGTG |
| | | | | GATATGTTCAAGGTAACTGGAGATCCAGGAAAGATGGCTGCACTAC |
| | | | | AAAAGACTCTGAGCAAATATGGGATCATAGAAATTGCTAGAACTGG |
| | | | | CAAGGTCATTATTGTTCAGAAAATAGTGAAAATTTATTGTGATCTTG |
| | | | | TTCTACACTATATCTAACGAGCCTTAGTGATGTTATAGATAGCTTTG |
| | | | | CGCCGTGAAAGAATGGGAGAATCTGCTCCATTTTGGGGGTTCTCTG |
| | | | | CAGCATCTTATCCTGATCTCGAAGTGACAATACCTTCAAATTCTCGTC |
| | | | | TAAGCACTGGAATGGATGCCGTGAGTCAGAATCCCAATGAATCTTC |
| | | | | AGGGGTAAGAAACCACAATTGTCCTTTTATCTGATCAATGGATGTAT |
| | | | | GGCGTGTTCTTTAGTTTCTAAGCACCGCAGTGCTGTTTTGTAATTGT |
| | | | | AACTGATATTTCCCTATTTGTTTGCTTGTCTGCATCGAGTAGATTTGC |
| | | | | ACTCATGCTTTCTGTTGACTAGTTTCGGATGAACAAATTGTTCTTTCT |
| | | | | GAATTCGTTTACATTGCTGTTCATTCTGTTCAATTGGGTACTAAATAC |
| | | | | CTGTCTATCTTCATGAAGAAACAGCCTTATGGCTAATTGGCTATTGA |
| | | | | TAGTTTTGCAATATTGGTCCCTTCCAAGGTGAACCTAGTATGTGTGT |
| | | | | ACTTGTATATGACATCACTTGCATATTTTTATATTGAACATATCTGAC |
| | | | | ACATTCCAGTGCTCACTCAATACTTAATTTGTCGTTTGAACTCTTAAG |
| | | | | TATATATAAAATGCTTGCTCATCTTTTGTTATTGGAGTGTTGTATTTT |
| | | | | GAATGCTTGCTCATCTTTTATATAAAATGCTTGCTCATCTTTTATTTA |
| | | | | AAATGCTTGTTCATATTAGTTTCAATTTTGAATGATTGTTTTATACAT |
| | | | | GCTTTTCTTCTTCTACCCAGGGCGATGTCTATCCAGTGGAATCGTAT |
| | | | | GAAAGTTTTTCAGCAAATCAAATTCTTGATGCTCATTGGGGTATTAT |
| | | | | GACAGATGGTGATGTAAGATCTTGTATATTCTAATCACTTTGAACTA |
| | | | | TTTGATGGTAGCTAGAGATGATTTGCATCTAGTTCTACTCATCCTTTC |
| | | | | ACAAGAAGTTATTGTGTTGCTAATAGTTAACAATCAAGACTGCAAG |
| | | | | ATCCAAATTAAACTCTAGTTTGTATAACTAAATTATGGTTCACAGTG |
| | | | | AGAAGTACAAACCATACCATACAGCAGTTAAATGTACCTAATTATGA |
| | | | | ATTAATCGAGGAATTTCTTGTTGCTTCAGTCAATAGGGTTTTGTTCA |
| | | | | CATACTTTATCGATTCTCGTGAATGATTTTCCTGGAGTTCTCAATGTT |
| | | | | GTGACAGGTGTTTTCTCCCGAAGGGGCTACAATATTCAGGTTCTTCA |
| | | | | AAACCCATTTAGTATATTGTGCTCCCTTTAATTAGATCACTACAGGAT |
| | | | | CCAGTCCTTGCTAAACAGTAACCATCACTGTCACAGAGTCTTGCTGT |
| | | | | TGGCCCAGCTGAAAAAGAAGGAACATCTCGCATCACTACTGTTGTT |
| | | | | CCTGGAACTGACGAATCTATTGCCAAGCTAATACATCAACTGTACAA |
| | | | | GCTGATTGATGTTCTTGAGGTCAATAATTTGCAGTTTCCATGACTGT |
| | | | | TATAGAAGTAATGCAGTTGGTATAATTGTTATAGAAGTAGTGTGGC |
| | | | | TCAAATTATTTTTTGGTTTCTCAGGTCAAGGATTTTACTCATTTACCA |
| | | | | TTTGCTGCTAGAGAGTTAATGATCATAAAGGTTGCTGCAAATGCTG |
| | | | | CAGCTCGAAGGGATGTCCTAGATATTGCTCAGATTTTTGAGGCCCC |
| | | | | AAAAGTTGACATATCAGACCACACAATTACACTACAGGTAACTGTTA |
| | | | | TTGAAATAACTTTTATTTAAATATACCTCATATAGGACTATAAGATTC |
| | | | | TTCTGAAAGTATGATAGTTTAATCATCTTTATGTACACAATAACGAC |
| | | | | TTCATATTGTTCATATATGGTATTTTTTAATGCGTATTGTAGTATTGG |
| | | | | TCCAACCATGAAGGGACTAATATATTGATGTTAATAGGCCAAATAT |
| | | | | GTCAGGTATTAGCATATTTTAGCAATTGGCAATCTTTGAATAAAGAG |
| | | | | TTATTTGAAATTCGTAAATTTTGGACTCATCATTTTCTTTTCTACTTTG |
| | | | | CCTTTGACTAATGATCTTTTCTACCTGCACTGACTTCTTTAATCAATC |
| | | | | GTGTTTCATTAGCCGTGCCTAGTGAGTAATAATCTTGTTGGTCTGTG |
| | | | | CAGCTTACCGGAGACATTGACAGAATGGTTAGATTGCAAAAGATGG |
| | | | | TAGAGCAATATGGCATCTGTGAGGTTTGTGTTGACTATGTTGCTTCT |
| | | | | AATTTCACTGATATGTCTGGCATTACCTTACCATTTCATGCATGATGA |
| | | | | TTTTCTTTTTCTCACAAGTTATTAATTGCCAGTGTTACTTCAGCAACC |
| | | | | TCAAGGAGACACTTGAAATATATTTATGTAATTGTCTTTCCTCTTTGC |
| | | | | CTATGCCTACTGCAGGTTGCACGAACTGGCCGGGTTGCTCTGCTCC |
| | | | | GTGAGTCTGGAGTCGACTCCAAGTACCTCCGTGGATTCGAGCTGCC |
| | | | | GCTGTAGTTATCCATTCACTGACATACCACTACGGTTTTACTCCGTGC |
| | | | | TTCCATTTGGTCTTCTGAGCATATGATGCAGCTTTTCATGTTTCCCTT |
| | | | | TGGACCAACAGTAGAAGAAATATAACTCAAAACCAAAGGTTGGGA |
| | | | | ATCATAGGCGGAATATTCTGTACAATCGTGTTAATTGGCTAAACAGT |
| | | | | GATAGGTTATATGGGTTGCTATGGGCTTATGCTGTAAGTTTCTTGAT |
| | | | | TTTGTAAGTAGCACTCATTTGCTCAGTTAAAAATTGAAATCTCACGG |
| | | | | AGCAAACGGGAGGTTTGTGGAATCATAAATGAACCTACCAAGCATA |
| | | | | ACAGGTGGGTTGGCATTGGCACAGCTAGCGCAACCGATCAAATGA |
| | | | | GAGATCAGATTGTGCGAGTTTTATTGATATAGCAGAAAAAGCTAAG |
| | | | | ACTATTACACTGGGAGGCCATATAGGTGGAAAGAAATGTATAATTT |
| | | | | TGCTCCAAATAAACAGGTATAATTTAATTTACCTGTCACCTTTTCAAA |
| | | | | TATACTCGGCACATTTACTGTATTCTGACGATTCAAGAATCTACGCT |
| | | | | CGTTGTATCAATATCTTTTTGCTATTTTTGGACTAGGTCGAGCTAGC |
| | | | | GGAAGATTTTTCTCTGGGCTGAATGTTCCATCCCAAGCCCGACGGA |
| | | | | CCTTCTTTAATTTGTGTTTCGTGTCAGACCATGATTTGGGTTTATTGG |
| | | | | GGTGGGATTCCTACCCATGATTTGGGTTTATCACTTTCTTGTTCGGTT |
| | | | | GGAGGGTATCCAATACAGGGGCTGATTTAATCCCTGCCGGTATTGG |
| | | | | GTGGATCCCTGAGCTGCCACCCAATCCCTGTGGTGTTTCATTCCCTG |
| | | | | TTAGCACTAATCCCCTCTCCTCCCTTTTCTTGTTCGGTTACCCACCAT |
| | | | | GGATCAGAAGACGCAACAAGTGATGGTAACAGGTAGAAACATACA |
| | | | | TATCCCTTTCCTGGACAGAAGATCATACGCAATATGGCAAGCTCATA |
| | | | | CACAATAAGAAGACTACCTGGTCAATTGTTTCCTGGACAGAAGTGC |
| | | | | ATACATAACTCCACCAAAGACTGACAACAGGGTAATCATGACCATC |
| | | | | AAGTTTGCAGACTAACCAACAATCGTTAAGTACCAAGCAATCTATG |
| | | | | ATCATGGAACTATAGCATTGTTTGCCCCTAATTCTAACCAGCCAAAA |
| | | | | ATCCAAGACTACTCAACTGTTAGAACACCGATAATAAGCTGGAGCA |
| | | | | ATGAGTATCGATAGGCTCCTTAACAACATATAATCTTAATGCTTAGG |
| | | | | CTGCATATTCTTCTTGGCACCAAACTTTGTAGGGGATTCAGTGCACT |
| | | | | GAGCTCAGTCTAGGAATAGCCAACATTGTCAGACCAAGCTTGTAGT |
| | | | | AGT |
| 1770 | Digitaria | gDNA | 4483 | ATAAATATAAAGGGCCGTGGCCGACTGAGGACGAACAACTCCAAA |
| | sanguinalis | Contig | | CGAATATTTGCATATTACTTTTATCTCTCAAACCCTAACTTTTCCAATC |
| | | | | TTTTGCTTTCCTTCTTCGTCTCCACGGTGATTCAGAAGGTTCTAAGTG |
| | | | | GCCCTGTCAACCTTAGAACAACCCTAGGTTCGTTGCCTCCGACGAG |
| | | | | GTCTCTCCCGAGGCGGCGATCGTAGGCTTTTGCAGCGACCTAGCTA |
| | | | | CAGGCGGTCTAACCGGCTGCGCAGAGAGGCGCCGGCGAGGTGATT |
| | | | | TCAACTTTCGCGCGATCCAGCGCACGCGTTTGTTGACCGAAAAGGC |
| | | | | GTCAACACTTTCTGATTCTTAGATGAAATAAAGCCTGCAAATGAACT |
| | | | | TTTTTTTTCAGTCCAACAATTCATTTCAACAGAAGTAAGATCGGTAG |
| | | | | TTGACAGTACAGACACAGAAGACTTGAATTGAAACTAAGGTTCCTG |
| | | | | ACGTGCAAATTATATATGGAGACCTGAATGGCAACACCATTTCCTTG |
| | | | | TTTGCCGATTTCAGAACATGAATAGCCATCGGGATGTCTGAATGATT |
| | | | | CAGTTTCATGTTCAACAAACACATGTCTATTTGGTTAACTTACGATGT |
| | | | | ATGTCTATTCAGAACATGGCAATATCAGAACATGAATTTGCCGGCG |
| | | | | TGCACTCTCCAGTCCGTCCGGGGCGTCCACCTCCTTAGCTTGCCGGC |
| | | | | AAAGGGCAAAGTTGCCTCCACGCCAGCCACACTAGAGTGTCCACCA |
| | | | | AAACAGGAAGAAGCCGCCGGCGGACTTCCATTCAGACACGCCTGG |
| | | | | GGACTTGAGGTGCTCATCGAGGGAGATGCCGAAGAGAGATGACGG |
| | | | | AGACACTGAGAAGAAACCGCCGTCCGAACTAAACGGATCGGAAGT |
| | | | | TGAACTTGGATGGGCAAGGGTAGGGCTATAGGGTTGGATCCATTC |
| | | | | GGGTCACCCATAACAAAGTAATTAAAAAATAATTATTTAATTAGATG |
| | | | | GGTTGCTTTAAGACTCGTCTCCTAAAATAAAAGTGGAGTATCGGATT |
| | | | | AGTTCTCTATTATAATTAGTAGCAAATTAAATATATATGTGCATTGCT |
| | | | | GCAGGCTAAAGAAATGTATCACTACTACACAACCCCTTTCGCAGCC |
| | | | | GGTTTTGCCAACCGTTTGATTCCACCAACCGGCTATGATTAGGGTAC |
| | | | | CCAGGATTTTAGTTCCACATCCAAACAATTGAAAAAAATTTACTACC |
| | | | | CGAGCAACATCAACCTATGGCGAAGTGTTATTAATCATTCCCCTAGT |
| | | | | AAGTTATTATTAACAGTTTTTATTGCACTTCCATTGACATGCCTGGAC |
| | | | | AAATTTTCCTTTTTAATTTGTAGGGTTATTAAGCATCACACACTATCA |
| | | | | GTTTTTGTTGGTGATCAAAGTAGGATGATCAATCGAATTGCTGTGG |
| | | | | TTTTTGGTAGAAGAGGATATAACATCGAGCCATTGGCTGTTGGGCT |
| | | | | AAACTAGGATAAAGTATTATTTACAAAAGTAGTGTCAGGAATAGAC |
| | | | | AAATTATTGAACCAAGTTGTAGAGCAACTAAACAAACTTGTTATTGT |
| | | | | TATAAAGGTCCGTATTTTTCCCTCTAACATGTGACTTACAAAAATGA |
| | | | | TTAGTACGTCACAGAAGTCATCACTCTGTCTTGTCCTGAGTCTGTTC |
| | | | | AACATGGTATCTGATATTCACATGTTAACATTTGGATTGATAAGCAG |
| | | | | GTTGTTGTTATGTTCGGCAAGATGTATCAGAGGAAGAAGTGTGGCT |
| | | | | GAGGAAGAACGATTGACAAAAACGTGAAGCACTGCCCGTCAACCG |
| | | | | ACAACGTACGGCGACATATGCTACAGTAGGTGCGACAACGGCGAG |
| | | | | ACACGCTATAGTAGGCAGGTGCGCAACTACTGTAGGCCAACGCTCC |
| | | | | CACGATGTGGAGTAGTTCAGATTACTTTTCCTATACTTTAGTAGTAA |
| | | | | TTGCCAGTATTGTAATTTGGATATATGTCTCTGTTCGGAATTGGAAA |
| | | | | GAGTTATGTTTAGAGATCAATATGATCTCTAGACGTCCTGAGCTGCT |
| | | | | GTTTCTTCGTCTCACTCTTGCTCCCACCGGCCGTTAGGACGGCGTCT |
| | | | | CGTCCTCGCCGCCGGCGTGAACCCTCACCTCGCCTGCCAACTTCCTA |
| | | | | TTCATACGCACTCCAAGGGATTAGCATTGCCAACAATTTGGTATCAG |
| | | | | CAAGCAGCTGTGTCCAGGGATTGACGACTGGGAATTCCATCCACAC |
| | | | | CGCCGCCATGTCCTCCACTCCCGTGTCCACCACAGCACCGCCGCCTT |
| | | | | CCACTACCGCACCACCACTCTCATCCACCAACCTCGCCACCACTACT |
| | | | | GTTCCAGTCGCCACCATCGACACCCTAACGACGGCGATCTACAGCTT |
| | | | | GCAACGTCAAATAGGAGAATTCGCCAACCGTCTCTCTATGGTTGAA |
| | | | | CATCGTCCTCATCCACCGGAGGCCGGACCATCGGCATCACTGCCAC |
| | | | | ATGGGTTGCCGGGCTATGACGGCATCCCACATCATCATCCATAATC |
| | | | | GTCCATACCTCCACAACCATCGAACTGGTTCCCATCACTCAGATTGC |
| | | | | CTTTTCACCCTCCCCTTCACCACTTACTCCACTGCATGAGAGATTCTA |
| | | | | CATGATGGAAAGAGATGCAGGTGGCAAATGAAGCATTATTGCAAA |
| | | | | AATATAATGATGTCAATATTCTAGTAATGATTAATGAAACTCTTATT |
| | | | | GCAATGGGAATCTTGATGATACAGTTTTTCCACCACCAAAGATACAT |
| | | | | GTCATGCTTTATTAATACTCCTTATTGTGGCCATGCACTTCATCAGGA |
| | | | | CCTTAGCTCGATGAAGGGCGCTGTGTGCAGTGTGTCTTCAAATTTA |
| | | | | GCAGTGCATTTACGTCGTATACACTCCTCTCTGCTGCTGTAAGTAGT |
| | | | | TCGACAAGGCACTGCATCGTTCCCTCGCCGCCGGACTGCAATGTCCT |
| | | | | CACTGACCGGCAACAGCTATCATCATAGGTTGGGAGTATACGGGAG |
| | | | | GGATTTGAGCGTAGGATGAAGCGGTTACAGACATTACGGACAATA |
| | | | | AAGTTTTTCTGTCTCTCTGTACATGGTTGTGGCTTGTGACAAAACCA |
| | | | | ACATCCACCACTCACAGGAACAAGAGAAACTGTAGCAAACACTAGT |
| | | | | AGGAGGAGAATAGCTGCTGCTTTCCCAGTTGACATCTTAATGCCCA |
| | | | | ATGTTATGTCTACTAGATATTGCTAAGAAAATGTTATGACTAGATAT |
| | | | | TGACCTCCTGCGTTCATACGTGCTCCTATATATAGGAGGCAAAGCAT |
| | | | | GCAGGTTGGTATACACCGGGTTTAATGCGCTTTTATCCTTGATACCA |
| | | | | TATTACGTGATCTAGATATGGTATCATTTATGAAGCGATCCTTAGAG |
| | | | | ATATTAATGCCTATTGTAGAGTTCCATGTTATCCTCTTGTATTCATAT |
| | | | | TTTATGACCATAAAATAACTAGAATTATTTGAATATCTCATCAGGAT |
| | | | | AAATAATCAGTTTATTAATTCATGCCTTACCTTTGTTTTGTAACCACA |
| | | | | GCAGGTCCCGTCTCCCGGATTGTCTTCTTTTGCATGCACGCATGCAT |
| | | | | TCAGGGCCGCTGACACCTCGAACGTTTCCATCCGTATATGCATGCCA |
| | | | | TCGCCCGGGCGACCATGTAACTCAGCTCTGCGCCGACCAATCAGTG |
| | | | | CACCTGCCTCTTGACAGCCTCGCCGCCGACGAGCCGCCGTGCGCGC |
| | | | | GAAGGTCGCCGCGCTCTCGCAGTACGTCGCCACGCCAACAAGTTCA |
| | | | | AGAAGGACGGGACCGGCGGCGGCGGCTACACCACCGCCACCGTCG |
| | | | | GTACGTACGGACGGTAGCCACGTCAGCACATCCATCTGCTTGATCA |
| | | | | TGCACAAAACCTGCATATACCTATAATTTGGAAGGTGCTAAAATAAT |
| | | | | ACAATTATGTGTGCAGAAGAGTGGATTTAAATCTTCAAGCAACATG |
| | | | | CAACAAATGTGAGAAAGAAGAGTGCTTTTAAATCTTCAATCAACAT |
| | | | | GCGACAAATTTTACCCTTATGAAAGCTGCGGGAGTACCCGCCGAGT |
| | | | | GCAGCCGTCCACGACAGTGAAAAAAAAAGTTACCGCCGGATCTGA |
| | | | | GCCTAACAGCCGGTAATTCTGTCTCCTTTTGTTGATGCAACCCGTTG |
| | | | | AAGCCCCACCCGTCGGTGCACCGATTAGATTCCACCGCTACTCTTCA |
| | | | | ACTTTTCATTATTCATCAAACTTTCCATTATTCATCCACTCACACCTAT |
| | | | | CACGATCTATAGTGTTTTCTCTCATCTACAGTGTATTTTCACCCAGTC |
| | | | | TAAACACACCCTTGAAAACACACCCGGTGTGGCCTCTCCCCATTCAC |
| | | | | CCAGAAGTGTTAAACACACCCTTGAAAACACACCCGGTGTGGCCTC |
| | | | | TCCCCGTTCACACAGAAGTGTCCCGAACTGCCACGGGGAGCCACTG |
| | | | | GCGTGGGCGGTAAAAAAAGAGAAAAAAATCTACCCCTCCTTTTTTT |
| | | | | GCCTTCCTCGCCACCTCGGCCGTGGCCGTCGTGATCGTCCGTAGCTT |
| | | | | CCCTCCGTGGCCGTCAGCAAGGTACGCTCCCTGCACTTCTTCTTTTCT |
| | | | | CCATGTACTC |
| 1771 | Digitaria | gDNA | 3928 | TCTTTAGTTTCTCAGCACTGCAATAATGCTTTGTAATTGTAACTGATA |
| | sanguinalis | Contig | | TTTTCCTAGTTGTTTGCTTGTTTGCATTGAGTAGATTTGCACTCATGC |
| | | | | TTTCTGTTGACTAGTTTCAGATGAACAAATTTTCTTTCCGAATTGGTT |
| | | | | TAATTTGCTGTTCATTCCGTTCCATTGGGTACTGAATACCTGTCCATC |
| | | | | GTCATGAAGAAACAGCCTTATGGCTAATTGGCTATTGATAGTTTTGC |
| | | | | AACATTGGTCCTTCCAAGGTGAACCTAGTATGTGTGTACTTGTATAT |
| | | | | GACATCACTTGCATATTTTTATATTGAACATATCTGACACATTCCAGT |
| | | | | GCTCACTCAATACTTAATTTGTCGTTTGAACTCTTAAATATATATAAA |
| | | | | TGCTCGCATATCCTTTTTTTTTGTTGCCGTGTTGTATTTTGAAAATAC |
| | | | | TTTTATCATCTTCATGATATTAGTTCCAATTTTGAATGATGGTTTTAT |
| | | | | ATGTGCTTTTCTTCTACCCAGGGTGATGTCTATCCAGTGGAATCTTA |
| | | | | TGAAAGTTTTTCAGCAAATCAAGTTCTTGATGCTCATTGGGGTATTA |
| | | | | TGACTGATGGTGATGTAAGATCTTGTATATTCTAATCACTTTGAACT |
| | | | | ATTTGATGGTAGCTAGAGATGATTTGCATCTAGTTCTACTCATCCTTT |
| | | | | CACAAGAAATTATTGTTGCTAATAGTTAACAATCAAGACTGCAAGAT |
| | | | | CCAAATTAAACTCTAGTTTGTATAACTAAATTATGGTTCACAGTGAG |
| | | | | AAGTACAAACCATACCATACAGCAGTTAAATGTACCTAGTCATGAAC |
| | | | | TAATCTAGAATTTCTTGTTGCTTCAGTCTACAGGGTTTTGTTCACATA |
| | | | | CTTTATCGATTCTTGTGAATGATTTCCCTGGAGTTCTCAATGTTGTGA |
| | | | | CAGGTGTTTTTTCCCGAAGGGGCTACAATATTCAGGTTCTTCAAAAC |
| | | | | CCATTTAGTATATTGTGCTCCCTTTAATTAGATCACTACAGGATCCAG |
| | | | | TCCTTGCTAAACAGTAACCATCACTGTCACAGAGTCTTGCTGTTGGC |
| | | | | CCAGCTGAAAAAGAAGGAACATCTCGCATCACTACTGTTGTTCCTG |
| | | | | GAACTGACGAATCTATTGCCAAGCTAATACATCAACTGTACAAGCT |
| | | | | GATTGATGTTCTTGAGGTCAATAATTTGCAGTTTCCATGACTGTTAT |
| | | | | AGAAGTAATGCAGTTGGTATAATTGTTATAGAAGTAGTGTGGCTCA |
| | | | | AATTATTTTTTGGTTTCTCAGGTCAAGGATTTTACTCATTTACCATTT |
| | | | | GCTGCTAGAGTTAATGATCATAAAGGTTGCTGCAAATGCTGCAGCT |
| | | | | AGAAGGGATGTCCTAGATATTGCTCAGATTTTTGAGGCCCCAAAAG |
| | | | | TTGACATATCAGACCACACAATTACACTACAGGTAAACTGTTATTGA |
| | | | | AAAACTTTTATTTAAATATACCTCATATAGGACTGTAAGATTCTTCTG |
| | | | | AAAGTATGATATTGAAGTACTGGTCCAACCATGAAGGGACTAATAT |
| | | | | ATTGATGTTAATAGGTCAAATAATGTCAGGTATTAGCATATTTTAGC |
| | | | | AATTGGCAATCGTTGAAGAAAGAGTTATTTGAAATTTGTAATTTTTG |
| | | | | GACTCAGTCAATCATTTTCTTTCTGCTTTGCTTTTGACTAATGATCAT |
| | | | | TCATACCTGCACTGACTTTTTTAATCAATCATGTTTCATTAGTACTGT |
| | | | | GCCTAGTGAGCTATATCTTGTTGTCTTGTGCAGCTTACCGGAGACAT |
| | | | | TGACAGAATGGTTAGATTGCAAAAAATGGTAGAGCAATACGGCATC |
| | | | | TGTGAGGTTTGTGCTGACTATGGAGCTTCTAATTCACTGATATGTCT |
| | | | | GTCATTACCTTACCATTTCATGCATGATGATTTTGTTTTTCTCACAAG |
| | | | | TTATTAATTGCCAATGTTAATTGTACTTCAGCAACCTCAAGGAGACG |
| | | | | CTTGAAATATATTTATGTAATTCTGTCTCTTTTCTTATGCCTACTACA |
| | | | | GGTTGCACGAACTGGCCGGGTTGCTCTGCTCCGTGAGTCTGGAGTG |
| | | | | GACTCCAAGTACCTCCGTGGATTCGACCTCCCGCTCCCCCTGTAGTT |
| | | | | CTCCATTCACTGACATACCACTCTACGGTTTTACGCTGTGGTTCCATT |
| | | | | TGGTCTTTTGAGCATGATGCAGCGTTTAATGTTTCCTTTGGGACCAA |
| | | | | CAGTATTAGAAAGATAACTCAAAACCAAAGAGTGAGAATCATAGGA |
| | | | | AGAATATTCTGTGCAATCGTGTTAATTGGCTGCAGAGATAGGTTATC |
| | | | | TGGATTGCTATGGGCTTATGCTGTAAGTTTCTTGATTATGTAAGTAG |
| | | | | TAAAGTAGCACTCATTTGCTCTGAAAGAAATGGAAATCTCACGGAG |
| | | | | CAAACGGGAGGTTTGTGGAATCAGAAATGACCCTACCAAGCATAAC |
| | | | | AGGTCGGTTGGCATTGGCACAGCTAACAAAACCGATCAAATGAGA |
| | | | | GATAAGATAGTGCAAGTTTTATTGATATAGAGGAAAAAGAATACAA |
| | | | | GACTAGCACTGAGGCTATAGGTAGGAAAAAACTACATAGGTATAAT |
| | | | | TTTATTCCAAATAGACAGGTATAATTTTACCCTTCACCTTTTCAAATA |
| | | | | TCCTTGGCATACTGTATTCCTCACGATTCCAAGAATCTACGCCCGTTT |
| | | | | TATTCATGTTCGCCTAAATGGCGGTGTGTTCGGTGTGTACGTTTTAT |
| | | | | TCAGTGTTCGCCTAAATGGCCGTGTATTCGGCGTGTACACAGTACAC |
| | | | | GGCGGTTAATTGTGCAATTTAGGGTATAAACATTAGTTTACATGGTT |
| | | | | TGCTTGTTTACACGGATTTACACGGTCCAAACAGCCTACACGGCACA |
| | | | | TTAAAAACACGGTTTTGCATGGCATGTTGGCATTTTCTTCTTCGTTTA |
| | | | | GGCGATGGAGATCCAAGAAGATTCCAATCTGAACCAGAAGATGTCC |
| | | | | TAACCAGCCTAATCTGAACATGCTTGTTAGTCCTATGTTAATCTATCC |
| | | | | GTTGTAATTTGTGGTAGCATATGACTTATGAGTTGTATTTCCTAGAT |
| | | | | AATGGATGACAGCTATATTTAATTACCTATCACTTTTTAATTGGTTAA |
| | | | | GTGAATAAATTGTCTAACCATGAGATTATATGTATATTTTTCTAATAT |
| | | | | AGCACAAAAACGTGTAATCCATAAATTCCGTCTAAACGGTCTAAAC |
| | | | | GCTACACGACACCTTTTCAATTGTTTAGTGTTTACGGTTTAAGCTAAC |
| | | | | ACTGGTTTTATCAATGTCTTTTTGCTATTTTTGGACTAGGTCGAGGTA |
| | | | | GCCGAAGGTTTCTTGTTTCTCTGGCTGAAAGTTCAATCGCAAGCCCG |
| | | | | ACGGACTGACTTTGTGTTTCGTGTCGGCCCATGATTTGGGTTTATCG |
| | | | | AGGTTGGGAGGTGCCTGCTACTCCCTCCCTCCCTCCTGCAAGGGATT |
| | | | | ATAGCCTAGCCCAACGAGTCAGAAAGAACTATATCAAATAATTCAA |
| | | | | TGAACCGATGTTGGCCCACAAAAAGACTAAATATATAAGCTGCTGC |
| | | | | TATTTGCAATTTTGATAAGGCTTTCATCCCGGGCTGGACCTGTGCGC |
| | | | | AGGTGTTAGGCTAGCTAAAGCTAGGTTGATTTTTAGTGTTTTTAGCT |
| | | | | CATGCAGGACAACTTATTTTGGAGGAACAACTCCACGTTGCTGCTAC |
| | | | | AAATAGATAGATAGGTAGATATGGCACATGTATTGGAGGAACCTCT |
| | | | | CCAATGTGCTAATAGGTAGAAACAGCACAAAGTGTTTATGAACCAC |
| | | | | TTCAACGTGTTGAGCTAGATATCATTCTAGAGATGAAGATAGACCA |
| | | | | AAAGGTCGGAATCCGAATCCACGGATCACATGAGCTTAATCCAAAG |
| | | | | CCCTTAGGATACAAGATTTAGTCCAAGATCTAAACGGTAGAACAAC |
| | | | | ATGTTCTATTCATAAGGTAGTGGGTACATCGAAACCACCTTACAAAC |
| | | | | TTTGGCTTGCCTCTATTTATAGGC |
| 1772 | Digitaria | gDNA | 579 | TTATATATCTCCCTGAGTGCCTTTCAATAGTTATAGTTGGATTGACTA |
| | sanguinalis | Contig | | ATAAGTAATAATTCATCTATGAATGACCCAAATAAAGGTTACCAGTC |
| | | | | AACAAATTAGTACTCACCCTTACAAAGTTGTTATAAATATCGTTAAT |
| | | | | CACCTCAATCCTTCCAGAAGTAACTCCTGTAAAACTCTGTCTAACCAT |
| | | | | AACTGTTGTCAGGCGATTTCCCACAAAAGAATTTGCGAAAATGTTG |
| | | | | ATAAAGAAACCAGAGCGAATTCCTAGTCTCCTATCCCAGTATTTCTG |
| | | | | AACTGACTTGGAAGGTTTGCGCTGGCGGTGGCTGATGCCATAACAA |
| | | | | AGATGGGGTCCGGAGATGTTAATTTTAGTCTTGTTTTATTAATTGGA |
| | | | | ATTTCATTTCATGATCCAGGTTAGAGATATTACACACCTGCCATTTGC |
| | | | | TGAGCGAGAATTGATGCTGATAAAGGTCGCTGTGAATACTACTGCA |
| | | | | CGGCGGGATGTCCTTGACATTGCCAGCATATTCAGAGCTAAGGCAG |
| | | | | TTGATGTCTCGGATCATACCATTACTCTTGAGGTAGAATGTAGGAGT |
| | | | | CATTCATTATACCATT |
| 1773 | Digitaria | gDNA | 402 | GTATCTACCCGAGATTCCGTCAAGAGAAGTATCAATGGTGACACTA |
| | sanguinalis | Contig | | GCACATCATCAGGGGTGTGTAAACTTCCATTTATTAAGATTAAGCAT |
| | | | | AAGATCATATCGTTCTTGCCAGAATAAGTTCGGTATAGTTCACTTCA |
| | | | | ATCCATTTTTGCATGAGTAAATTTACAATGCAGCACACTTCGGTTCC |
| | | | | ACCCATCATAGCCATTTTGCTTATAAAGATTGATGAAATGCTTTCTTA |
| | | | | GTCTAAAGGGGGATGTTTATCCAGTGGAGCCATACGATGACTTTAT |
| | | | | GGTGCATCAAGTACTTGATGCGCATTGGGGTGTCCTCAATGATGAA |
| | | | | GATGTAAGCATTCTTTTATCCGTTCCCAAATCTTTCGAGCTTCCTGCT |
| | | | | GTACTCTGAAATCCCGCCCAGGCGCGG |
| 1774 | Digitaria | gDNA | 227 | TATACTGTGTTCCTGCCAAACTGATTCATGGCTGAATGCATTCAGAC |
| | sanguinalis | Contig | | AAGTGGGGTCCGTTCACATACTCTATCGATGCTTGTCAATGACAAGC |
| | | | | CAGGAGTTCTAAATGTTGTTACGGGGGTTTTCGCTCGAAGAGGTTA |
| | | | | CAACATTCAGGTATGCAATCACTATCTAGCCTTGTGGTCTGGCGCTG |
| | | | | GGTCCTTTGTTGTTGTTGTTGAGGTTTGTGTGTTGTTGTC |
| 1775 | Kochia | gDNA | 12412 | TAGTGGAAGAGATGAAATGTCTAGTTATGGAATTATGGTTGATGAT |
| | scoparia | Contig | | TTTGGTTTCTGGTTTGGTAAACGGAGGTTTAATTCTCTGGCTAGTTT |
| | | | | TGCATTGATGAACAAAGTCATTGCCCAAGCCACCAACTGTTTTCATT |
| | | | | TGAAGGAGGCTCCCCGACTCATGTATTTTTCAGCCATGAATCTCGAT |
| | | | | CAAGTGATTAATTTGATCTTAGGTCATTCATATTGCTCTTGTTGTTCG |
| | | | | CATGGTTTTTTTACAACTTTCTAGCATTCAGACTATGGTAATTTCTTT |
| | | | | TTTCATGCCAACACTTCCATCATTTGTCATAACCTATTGCTTGACGAA |
| | | | | GATTCTGTGTAATGACATGTGCTTGAGTTTCCACTTATTCACAACAA |
| | | | | CCAAGTTGTGAGAAGTTGATGATTTATAGGGCGTGTTTGACAATAG |
| | | | | TAGCTGGCACTGGGCGTTTAGTTGTGGAAATAGTTGGTAGTGCTAA |
| | | | | CATTGGTAGTTAGCGGTAGTAGTAGATGTTAAGTGTCAACAAGGGA |
| | | | | TTATACAATCTAATAATTTGGCAATGGTAACAGTTGTATATATAATA |
| | | | | AAAGAAAAATGGTATAAGAAGAAAAAATTGTACCCGCTACATGACA |
| | | | | AATGTTAGTCCTAGTGTTGAGCAATATTCTCTTTAAGCACTTACCTCT |
| | | | | ATCCGAAACATTATTTTGCCAAACCATAATTTAAATTACCAAGTAGT |
| | | | | GTTTTGATCTAGTCATACCACTAAATGCTATCTTATACTCCTACGCCG |
| | | | | ATCACGCCCATAGCATAGGTGAAACTATATAAAAAAAAATGCTAAT |
| | | | | GAAATGCCCCTATCCCAAAACAAAATAAATGCATTGTAACCCAAGTA |
| | | | | TTAGTAGATTTGATCATGGTATTTGGTCGATTTTGATTAATGGCTGT |
| | | | | AGTTCCCAAGTGCAATAGGAATCTTCTTTGGTGAATGTACCCACGAC |
| | | | | CCTGAAAAGCCTTGAATTTTGCATTTATTGTAATCAATCAATCAATCA |
| | | | | AAGCCTTATTATCATATGTGGGGTCGAACATGAACCAAAAGTGATT |
| | | | | ATTCCAGGAGGTCATCCATATAGATTTTCCTCCTCTATTCTCTACGAT |
| | | | | CGAGAGCCTCACTCTTGCAAATCCAACTGTTTCAAATCCTTTCTAACT |
| | | | | CCTCCACTTTATGGTAATCATTGTATAAAAAAACAAAAAACAAAAAA |
| | | | | CAAAGAAAGAAAAAGAAAGAAAGAAAAGAAAGGAGATCAAAGGG |
| | | | | CATAATAGTTAATTATGATGCCAAGTAAAAAATTAGTCTGGGTCTTG |
| | | | | GGAAATAGTGATGTGACAATGAAGAGGTTAACGGATGATGGTTTA |
| | | | | TTCCACTGGAATTTGTTCTAATTGTTCGTCTTTCAAACCTTGTTTGAG |
| | | | | TTATTTAGTTGCCTTTTGGTGTTGTTCAAATCAATTTATTATCGTGAA |
| | | | | TTTGTGATGACTGAGATAGGTGTTTTCACAACGTATTTGGTCTAGAA |
| | | | | CTAGTCACAACTCGCATTTTGTTTGTGGTATGTGTAGTAGTGACGGT |
| | | | | GTTTCCACGGGAGAAACAGAGTGATGCTGCGTTTGCATGCATTATT |
| | | | | GTTTTTGGTATCATCTTTGTTTCTGATTCAATGTTTGGAATTGAAATG |
| | | | | GAGATTACTTCCTAGTTGTTTAAATATCTTATTTGTGATTCAGGAAGT |
| | | | | TGAGTTTGGTTTAAAATGTATGTATCTTTGGATTTTAGAAAAAGCCA |
| | | | | AGGGAGGTCAAATGCCCAAATGTGACTTGTGATGAAGGGAATTAA |
| | | | | AAGAGATATGGAGAAAGTAGGATCATAGAGCTCTGGATAGAGGTG |
| | | | | AATGGAGGAAGAGGTCCTTATTGATGATTGTAAAATATAAATTCTT |
| | | | | GATTCATGCAACCGTTATTCGTTAAACAATATCAAAGCTTTGTTATA |
| | | | | ATTCTTAAGGCTGTAGTGTTTCCTTGTAGAAATGCTGTAATCTGCAA |
| | | | | ATTTTGCACATTTAATGAATTATATGATGGGTTATCTTTAAATTGTCT |
| | | | | ATAATCTTAATTGTGGTTGTTTAAAATGTCTAAGGGCAAGACGACAT |
| | | | | ACCATTTCAGTATTTGTTGGGGATGAGAGTGGAATGATAAATCGAA |
| | | | | TTGCTGGGGTCTTCGCTAGAAGGGGTTATAATATTGAATCTCTTGCT |
| | | | | GTTGGATTGAACAAGGACAAAGCTCTCTTTACAATTGTTGTCTCTGG |
| | | | | AACTGATAAGGTTTTGCAGCAAGTGATGGAACAACTTCAGAAGCTT |
| | | | | GTAAATGTTCTGAAGGTTGTCTTTTGCTTTAGATGAAAATTAATTTT |
| | | | | GCATTGATGTTTTCCACGAAGTATTATCTGAGATCTATTCTCATGGC |
| | | | | CTTTTATTTATGTTTAGGTTGTAGATTTATCCAAGGAGCCTCAGGTA |
| | | | | GAACGTGAATTAATGCTTGTTAAAGTTGGAGCTGATCAGAGTAAAC |
| | | | | GTGCTGAGGTATCATTCACAATATGTTTCGGTTCCCCAAAAGTGGAA |
| | | | | GCTAGTAATATTATTCTTGCTTGTCAGAAAATTTCGTTTAGTTGTAGC |
| | | | | TAATTATTTTGAAATAGTAAATTTGTTGTATGCTAATCTTCCGCCATC |
| | | | | ATTCATCCTGATTGAACTTTACTGTACAAGTATCTTTAAATCTTTGAG |
| | | | | CTGAGTGAATTCTAATTTATAATGTTTGCTACTTATATAATAACTTTT |
| | | | | GTTATTTCCTTTTGATACTGCAGTTAATGTGGTTGGTGGACATCTTCC |
| | | | | GTGCTAAAATTGTGGATATTTCAGAAGAAAATCTTACGATGGAGGT |
| | | | | ATCACTGGAAACATTATGCAGATTAAGACAAATTTCTAAAGAACTAT |
| | | | | GTAATCATCCTAACGAGGATTGACTTCCAAGAATTTAACACATGTTA |
| | | | | TCTGCTTTATTTTTCAGTAGTCTTTGATGCTTTAGGTGCATTTGAATA |
| | | | | ATTTCTGTTTTAATATATATTCTAATAATGTTATAGTTACTGTATGTG |
| | | | | ATTCTATGATCCAGGAGATGTAACTTAAGTATTTTGTTTTGCTTGGT |
| | | | | GCATACCCATTTACTTCCTGGAAATATTTCATGTAGCTTGTGTCATTT |
| | | | | ATATACTTGATCAAACAAGGTCCGAAAGGAAGTCATTTGAGCAACA |
| | | | | ACTTTTAACAACCAAGGTCCCTTTTTTTTTTTTTTTTTTTTCTCATTCTA |
| | | | | AAACTCTAATCTCACAAACTGCAATCTTTTAGGAACAAAGGGAGAC |
| | | | | CTCCTCCACCTAATATTTCTTTTAAACCAAAGACATTTTAGGATAAAT |
| | | | | TGAGAAGCTTTTAGAACAAGAGGAAATCAGCAACACTTAATGTTCT |
| | | | | TTCTTGGTCATGATGGACATGAATGAGGAATCTTTGGATGATGCTCC |
| | | | | CGTAGCTTTTAGTCCTTATTTAACTTTATGTATTTTGGGTTGTTTTGA |
| | | | | GTCTTTGTCTCTCCCTTGGGTTTTGTTGTGTTTTTTAGCTTAATGGTC |
| | | | | CTTTTGCTTTTTAATTGGCTCTCTTTGACTTTTGTTGGTTTTGTCGTGG |
| | | | | GGTTCCTTGGGGCTCTTCTCCCCTTGTGTTCCCTTGTACTCTTTTACTT |
| | | | | TTGGTAATGAATTTCTTTATATACCAATTATAATAGTAATAATAATAA |
| | | | | TAAAGAACCAGTGACAATAGGTTTAGTCACCAAAAGTTTTTAGACTT |
| | | | | GCAACATAGAATATTATACACATTAAAACACAATAGTAAAACTAAA |
| | | | | ACTAAAACGCCTACCAATTGGTGGTTTCTTCTCTTTTGAGAACTTTTC |
| | | | | CAGAGCATCCCAATCTCTTATTGTAGCAAGTGCAAACACCTTAAGCC |
| | | | | AATACCATCTTTTCTCAGAAACCTGGAAAAGAGTGGCAATGTCAAG |
| | | | | TAGACAATTTAAACAAAGTAGCAACTCGTCGACAAAAGAAATAAGG |
| | | | | ATTGAACGAACATGTATCTTGTTGCTTATAAAAAGAAGAAACAAATT |
| | | | | ACATACCTTGAATTCATTTTTCACCCTCAAAGCAGCTCGATGATTTCC |
| | | | | GAGTACAATGCATGTGCGAATCGTGTCACTGATGCTTGAATCTACA |
| | | | | AAGATTGCTTGCTTTGTGGATACCTCAAGCTCATGCTGCATTCTATT |
| | | | | ATGGTAGAAAAATTAAATTTTAAACACACATGAACAAGAAAATTCA |
| | | | | TAAACTAAAAGCTTATATTTAATCTTGTTCAGTTATGCATTAAGTGA |
| | | | | AAATATCACCCCCACAGGATACAAGGAACAAAAACAACTGAACATG |
| | | | | AGAGATAAAGGGCTGATAATTGCGAGATGACAATAAAGATGACAA |
| | | | | TAAAAGAGCAAGATAAATAATCTTGTTCCCCACAGGATACAAGGAA |
| | | | | CAAAAACTATTGCGAGATGACAATAAAAGAGCTCTTTTATTGTCATC |
| | | | | CTTTATCTTGCTCTTTTTCTGCGTTCAGCAAGTTTTTTCCATCGTTATT |
| | | | | TGAGATGGATGTGTGGGAATACTATGAGAGATAGAATCAAAAATG |
| | | | | AAGTTATCTATGGGAAAGTTGGTGTTGCAGATATTGCAAGTAAAGT |
| | | | | AAGATGAAGGAAAACCGTTTGCATTGGTTTGGTCATGTAAGACGGA |
| | | | | GATCTCAAGAGGCACCGGTGCAAAGAGTAGAAAACTGGGATCAGA |
| | | | | GTATTTTTAAATGAGGTAGAGGGAGACCGAGAATGACTTGGTGAG |
| | | | | AAGGAGTTAAAAGGGATCTACAAGCGAATGAGGCTCTTGATTGTA |
| | | | | GGGGGTGGAGGAGGAAAATATTTGTTGATGACTTCCCTAAATACTC |
| | | | | ACTTTTGGTTCATGTTAGTCGACCCCACTTATGGGACTAAGGCTTTG |
| | | | | ATTGATTGATTGACTTGTCGTGCACTGTTTATTTTTTTATAAAAAATT |
| | | | | CTTTTCTTTTATTACATGTTTTAAAAATTATTCGACAAATCCTTTGGT |
| | | | | GAATTACATAAGAATTTATGCTATTATCTTGGTGTATCTCTTATGTAA |
| | | | | ATAATTTTCCATGTTATAGCTATGTTTTTTGATCAGCTTTCTCTATGTC |
| | | | | GCACAAGGTAGAACCAAACCAAGAGTTCCGAGGATTGGTGTGTGA |
| | | | | AGGAGCTAATGTTCTCCCTTCCAAGTTTGTAGAGGATTCACTTCGTG |
| | | | | ATGGATATGGTAGGATTCTCTCTCTCTTTGATTTTTATATTGGAATAC |
| | | | | CTGACCCTTCTCTCCATTAAATTAAATTTTGTCATCAAGCTGTGCAGG |
| | | | | AAAAGTTGTCAATATTAGGCATTTGGATAAAGTAATTGACTCCATCA |
| | | | | ATGGGTGGTACATGGAGCGAGGCCTCTTTGGCATGGTTAATATCTC |
| | | | | ATTTCTTTCTGTTGTTTAAGACTTCTGGATCAGCCTCTTTCATTGCCT |
| | | | | ATCCTTATTTTGTTAAGGCTTGAGCGCGGCAATGTTTTGGAGCAGG |
| | | | | AGATTCAATGTTTTATTCCTACAGGTTTCAGGTGTTGAGATCCTTTCA |
| | | | | GGAGGTATACTAAGGTTACAAATTGCTGAAGCTGAGGTCAATGATG |
| | | | | TTTCAATTCGTTTCCTTGATCGGAAGACGTAAGTGATAATTTTCATAT |
| | | | | TTGGTACTAAAACGAGTGAAAAAGGAACAGTGGAGTCTCGATCATC |
| | | | | TCATAGCGTTTGTTTAATCAAAAGTACATTACTTCGGGCCTGTTCTT |
| | | | | GTCAGCTTACTAAACTTGAACTTATTTGAATGGAATTTGGTTGAATG |
| | | | | TATTATATCGATCCTATATTTGAGTGCTTCATGAGACCTTATTGGTCT |
| | | | | TAAACTCAACACTTGAACTGAACTTATTGGACCTAATTTTTGAATGT |
| | | | | AAAGAGCACACATTCTTAGTGTTAAACATTTTCATTAATTTTACGACT |
| | | | | GCATTATTTAATTTGGAAATGAAGAGGGTTTGTCCGTTTGTGGTTCA |
| | | | | TTAATATTGATACTACGTGTACTTATTATTGTTCTCTTTAGACGTGAG |
| | | | | CCAACTGCGGGGAAGACTAAGCCGGAAACAATACTTCGACAACTTA |
| | | | | CAACCAAAAAAGGACAGGTAAAATGCAATTTGTATGTCTGTTACTG |
| | | | | TGGTAGTAGACTAGTAGTAAATGATGTTCCACCTTTTCTGATGTATT |
| | | | | GATGTAAGATTAGGGTATCTACTGAGAGAATAATTTTCCTAGAGCTT |
| | | | | TATATGAAGTATTAATTTTTTATTGATTTTTAGTCTTTTTGTCTGCTGA |
| | | | | AAACTACTGAATTTCATTACATAGTTCTTAGATTTATATCAAACAAAT |
| | | | | GAGCAACCAGTGATTTGTGATATTTTAGTATGAAATCTTCCACGTTT |
| | | | | GGAAGATCAGTTTTCAGTTACTTGTTTTAAAATCCATAGGTTTTTATT |
| | | | | CTGCTATGGGTCCAGTGATTTAGAGCAGAAAAAAAAACATAACTGA |
| | | | | AAGAATAAAAGGGGAATTAGTTGATAGTTTGATGAAATAGAAGGG |
| | | | | GAGTTGCCTTGAGATCAACGTGATCTATACAATCACTCACTGCTCAC |
| | | | | TTTTTAGAGGTGGAGCTCTCCAATAGTATAAGCTAAGAGTAATTAAT |
| | | | | TTATTGTTGCATTCTCTCTCCTGATCCTCCTTTCATTTCCTTATCTGAT |
| | | | | CTATCCTTAGTGTTTTTTATTTTCATTCCCGACCATTGTGGCCTTTCGT |
| | | | | AACGTAAATGATTAATGGTGGTATTTTGTGTTGATAATTTTCATTTCA |
| | | | | TTGGTTTATTGGCCGATTTATTTATGATTTGGTAATGAGAAATCATA |
| | | | | CAATTTTGAATTTGCCAGTGTGTTGAGGTCTCACGTATCCTATATGC |
| | | | | TTCTGCCGCAGGTTTACAGTTTAAATCAGGGAAAAAGGGATGTAGA |
| | | | | AACTGTTTTAACAATGGGAATTATGGAAGATGTTAGCATTTTCCCCC |
| | | | | AGCCTGCTGGAGGTAACTGTGTCCTGTATTCTTATTAGCTTTATCAA |
| | | | | CTGAAAAAAATGCTGGTTTTTTTTAATTTTTTTTTAATTTTTTATTGGT |
| | | | | AGATTTGTATTGTTTACGCTTTTAAGGTTTAACCATTTAATAAATAAA |
| | | | | TCTGTTTGTAAGCCCTTTGTGTTTAATATCCCTTTTCGAAGCTTTTGTT |
| | | | | GGCCGCTGAGGCACTAAAGATGCTCTTTCTTTCTGTGTATTCCTCTTT |
| | | | | AAGAGGTTACCCATGTATTGGTGAGTCTGTATAGGCTTTGGTTAAAT |
| | | | | TCATACACTATCAAATTAGGAAAAGAAAAAGAAGTTATCGAGTTTA |
| | | | | TAACTAAAGAGTTTGCGAAAGGCACACTCGTATTCACCCAACCAAC |
| | | | | CTTGAATTTAAGTTTGAAGGAGATGCAAAACTAAGTGATAGAGGCT |
| | | | | CATATAATCATATAGACCACTTTGCCTTGTTGTAAGCCCATGTTGGC |
| | | | | GTAGTTTATGTTTTCCATATCCCAGTTTGGATGATTCCATCAATTACA |
| | | | | GTTTTCGAGATGAATTGTCATTTTGCAATTTCACACCTGCAATAACC |
| | | | | ATTGTGTGGGCCTGTGGCTATGGGCAATGGACTCACAAGTCACATT |
| | | | | GTACTGACTTTCCTTCTGAAAGCATAGAGGACAATTGATTTCGCGTT |
| | | | | CTAATATTATGCTTTAACAGAGTCAACAGAGATGATGAGATTGTTTT |
| | | | | ATTGTGCAACATCTCTCCTAGCCTGAGATTCTTTATGTCGTCAAATCG |
| | | | | CTCTATTGGTCTTTACTTTATTAGATCCTTTAAAGTGAAAGATACCCT |
| | | | | TTTCTATATTAATTTTTGTTTGAATGGAGTCAAGCTACCTAGGCAATT |
| | | | | TGATATATGATGTTACCGTCAACAAAATTGTTTGGCTTCTGTAGTGT |
| | | | | TTGTTTTTTTGGATGGAATAGGCCTCTCTTATCTGTATCCACTTCATT |
| | | | | GCTAAAAAAGATTGTTTATGTTGGATGAGAAGTTTGAGTTTTGCATT |
| | | | | TGTTCTTTGTTAATAAAAAAATATTAGCTGTTGCCTTAAACCTCTGGA |
| | | | | CGAATAAAAAATTTAGTCTAACATATATCTTTTGCTTCTAAAATTCCA |
| | | | | GACACTGGTAAGGTTGATTTGGTAATGAATGTGGTTGAGCGTGTGA |
| | | | | GTGGAGGTTTTTCGGCGGGTGGTGGAATTTCAAGCGGGTAAGAGA |
| | | | | ACATGTGACTCTGCTCTGTGCAATTTCTTATATGATGGTCAATGTTG |
| | | | | CTATGCATATGTTTATTCTGATCCAACAAATGCATTTACAGGATAAC |
| | | | | GAGTGGCCCATTGTCAGGTCTGATTGGAAGGTATATATCTGCTCTTC |
| | | | | CTATTTCTGTCGGATAATCTATTCAACTTCTCATGTAAATGCCATACA |
| | | | | AGAAAAAGCATTTCCTCTTGGTCAATTTCTATGTGATAATTGGGTTT |
| | | | | AAGGAATTTATATACTCGCATGCACACACACACTGACACACATACAT |
| | | | | CAAAGCAACATCTTTTTTGATTAATGATTTCTTAACATGCTGTGAACT |
| | | | | AATACTTTCTGTTTATGTTAGTTTATGTGTGCAAATTTTATAATTAAT |
| | | | | AATAGCTTTTGCTTTAATTTGGTTGCAGCTTCGCATATTCTCACAGAA |
| | | | | ATCTTTTTGGTAAAAATCAAAAAGTAAATGTTTCACTTGAGAGGGG |
| | | | | ACAAATTGACTCTATATTTCGGATAAATTACACAATTCCATGGATTG |
| | | | | AAGGTGATGATAAGCGTACACAACAGTCAATAGTGATTCAGGTGAT |
| | | | | TGGCATCAGTCTTGGCTGTCTGTATATCTTTTTAGAAAAAGCGGGTA |
| | | | | TTGCTTATCTTTCTTTGTGATTTTGATTCTCTAACTTAACTTTATTGGT |
| | | | | CATCCAGAATTCAAGAACTCCTGGTACTTTGGTCCATGGAAACCAAC |
| | | | | CTGGAAATACTAACATAACCATTGGCCGTGTAACTGCTGGCATGGA |
| | | | | ATTTAGCCGGCCTCTAAGACCAAAGTGGAGTGGAACAGCTGGACTT |
| | | | | ACGTTTCAGGTATCTTTGCATAATCTGTTTTGTATTTCTTTCTTGATTT |
| | | | | CTCATTGCTAAATTTGATCGATCAACTTGTGGGTGACATACGTGAGT |
| | | | | TATATAATTACCATTAATGTTATTGCAGCGTGCTGGTGCTCATGATG |
| | | | | AGAAAGGGGATCCTATAATAAAAGATTTTTACAGCAGCCCTCTTACT |
| | | | | GCGAGGTATATGAAATTGCTGGCAGCAACCTATTAGCTAAAACTTT |
| | | | | GAGACTGCTGCTTCTGTAAATTTTCAAGTCCATAGCTATTTATTCCTG |
| | | | | CATCTAGTTTCTTGCTTTGTTTAATCAATACCTTGTTTTCAGTGGGAA |
| | | | | TTCTCATGATAATATGTTGCTTGCCAAATGTGAGTGTGGCTACACTG |
| | | | | GTGATTTAGGTTCTTCAATGGTTAGTCCTCTGATCTCTAGAAACAGA |
| | | | | TGTTCATTATACTCTTTTTGCTCACATATTTTTATATGCTCTTTTTGCT |
| | | | | CACATAATTTCATTATGTTCTTTTTGCTCATATATTTTCATTATGCAGT |
| | | | | TGGTCTTCAGTATGGAACAAGGTCTTCCCATACTGCCAGAGTGGCTT |
| | | | | TGCTTTAATAGAGTGAATGCCCGTGCTAGGACAGGGATGGATGTTG |
| | | | | GGCCAGCTAATCTCCTTTTAAGGTTGGAGTTGGTTGTTTAAAGTTTC |
| | | | | CTATTATGGTTATGTAGAGCCTAGTTCAGAGTGTATGTGGAAATTTA |
| | | | | GTGTATCCTTATTCTCAACTTGTTTTTGGTGGTTCTTGACATTATTAC |
| | | | | ATTGTTACCTTTGATTCAGTTTGTCTGGTGGGAATGTGGTGGGTAAA |
| | | | | TTCTCTCCTCATGAAGCATTTGCCATTGGCGGCACAAATAGTGTGAG |
| | | | | AGGATATGAAGAGGGTGCCGTTGGCTCTGGTTGCTCCTATGTGGTT |
| | | | | GGCTGTGGGGAATTATCCTTCCCTCTGGTACTCATGATTTAAAAGCT |
| | | | | CATTGCAATTTTTTCTAACTTATTTCACTTCTTTAGTTCTCTTTAGTAT |
| | | | | ATATATATATGCTACAATTTTTCTGCTGCTATATCTTTGAATATAAAT |
| | | | | TGTTTTGCTTTTGCTTGGGATGTGGCAATGAGGACTGACAATATTGT |
| | | | | CTTTCAGAAGGGATTTGATCTTGGGAACATTTTTCATTTTATATTTTA |
| | | | | ATTTATCTTGAAAAACATACAAATGGCTCATCTAATGTAGAACCTAG |
| | | | | CAAGCTCCACTGCTTATACTACTGTGGCTAAGGCTGTCAGTTAAAGC |
| | | | | TTCAGAATGCTTGGAAAATTATTACCGTAAAAATAATAATAAAAAA |
| | | | | GGTTCTGGAAATGTGTGTATGAAGTATTAAGAGAAGCAACTCTAAA |
| | | | | AAGTCTATACTGTAGTAAAGTGAATCAATGTAAGAGAAAGTACAAG |
| | | | | TGTGTGTAATAATCAAATAACATTGTGATAATGTTAAATTGATTAAG |
| | | | | CAAATTGATATGTTGTGATTTGTTGTAGTAGTGTGCAAATATCGTTT |
| | | | | GATTTAAGCTGATTGTTGGACATATATACTTTTGTTTTTTGTTTTTTG |
| | | | | TTTCAAAAGGCTCTCCCCATTGATTTAAGCTTACAAATTTATTTATTT |
| | | | | TTTCCAGTTTGGTCCAGTTGATGGTGCTCTTTTTGCTGATTATGGAA |
| | | | | CTGACCTCGGATCAGGCTCTTCTGTTCCTGGTATGTGTAGCCCACCA |
| | | | | ACCCAACCCAAAATAAAAATAAAAATAGAATTCAAATATAATAAAA |
| | | | | CGGACATGCAAAATGAGTCGAGCTTTGTTATTATCATTAGTAGCCCT |
| | | | | AGATATTTTTGGCATTGTTAATCATGCTAGTACCAAAGTTTGAACAT |
| | | | | TCCAGCTTTCTAATAAATGGATTGATTGGATTCACAAGAATGAAGCT |
| | | | | CGTTATTCTGTAGTTTAATTTGTAATTCTTTAAAACATTGTGTTAAAA |
| | | | | ATGGAAATTAAGAGATTATGAGGATCATTATACATTGATATATTTCA |
| | | | | GACATTGTGTGAACTGATTCAGTTGAATGACGAAGATAATGATAAT |
| | | | | GAATTGATTACATCAAAATTACACTGGGATAGTAACAAATTTTTTTA |
| | | | | ATTTTTAGTTTTTAATTTTTAATTTTTTTTGTGCTAAAAAAAACAACCT |
| | | | | GCAAGGCTGCAACACTAAAAGTATTTAACTTATTTCTTTCTCTATTAT |
| | | | | CTCCACAGCTTCACTAAAATTCCAGATTCTTCTCAAGTGTTCAATAAC |
| | | | | AATTTTTTTTTCATATTCTAAACTACCTATCCCATAATATCGTTTCTTA |
| | | | | GCTGACAATTAGGTATTGTGGAAGTATGAAGTCTTTGCCTCTTTTTT |
| | | | | CCGCATCTGAATAGACTGTATTTTTGACACAAATCTGTCCGGTTCTT |
| | | | | AAAAAGAAAAAATTGTGGATTTATCACTTAGTTGTGTGCGAGTTTTC |
| | | | | ATTACAAATTTTTTTTACAGTTAGAGATAAATAAGATTTTGTGATCTT |
| | | | | TATTATACAAGTGGAGGGGGGAGGGAGATGGTATCCCTCTTCAAA |
| | | | | AAACTCAAAATACCCTTAATGAATTAAATGCATATTTAAAAAGTTAA |
| | | | | TTTTGTTTAATTTTTCACTTGCCAATTAAAAGTAGTGATCGTATTTTA |
| | | | | TTGAACAAGTTAAATATGAAATTTTATTTTAAAATTTTCAATCAAATA |
| | | | | TTAAAGTAATGAGAATGATTTTCTTTTCATATTTGACATATGAAACAT |
| | | | | GCTATTACTGACCTGTGTATATGAAACTCGATCTAATAAGAAATTAT |
| | | | | ATGAAAATTATATTCTAAAACTTAAATGTTAATTTTTTATTATTCAGT |
| | | | | ATTCTCTATCATATAGATAAAACTTTTTCACTTTATTTTAGTCAACGA |
| | | | | TTGAACCTAATACACAAATTCCTTTTCACTTTATATGAACACATGATT |
| | | | | TTTGTTACTTTAAAGAAAACAAATAAACATTGTTTTAAGAAAACTAG |
| | | | | CAAAAAAATACAAATAAATGAATATGTATGTTCAATTGTTCAAACCA |
| | | | | AATTTTCTACAGCTAACTTATTTTAAGAAATAACATTAATATGATACA |
| | | | | TGCACACCCTTAATTGAATGTGACCTTTCATGTATCAATGAAATAAC |
| | | | | AAATAATTCATATGATATGGACATATAGTTAGATTGTTAATGCAGAG |
| | | | | CTTATGTGAGAGATGGGTATGATTATTAAATATTTTTCTTTTAAATTA |
| | | | | TTTCATAGGCGATCCAGCTGGTGCAAGATTAAAACCCGGTAGTGGA |
| | | | | TACGGGTATGGATTTGGTATCCGCGTGGAGTCACCTTTAGGTCCATT |
| | | | | GCGGCTTGAATATGCATTTAATGACAAGCAAGCAAGGAGGTTTCAT |
| | | | | TTTGGTGTTGGTCATCGGAACTAACAGAGCTTCAATTGTTTGGGTA |
| | | | | GCTGCTTGCATCATCTATCTGCGATTTTGTTAGAGTAGGAAAGGAA |
| | | | | AAATGCTGCTTGTATTTTTGCAGTAATTGGTCTGGAATCGATGAGAA |
| | | | | TGGAGGGCTACACAAACTTGAAAATATTTATTCTTTGTTTCACAGGC |
| | | | | TCAAGTACATCGTCTCATCTGTTTTTTCTCAGCTGTGAATGTATAATA |
| | | | | AGTTTAACCTGCGAAAATTGCCATTAAATCACTTGCTCAATTATTAA |
| | | | | CCTTGATTCTGCTACATGACTTTCGGCGAATCTTGCCATCTACAAACT |
| | | | | GTACGTTGAATCTTTAATAGAAATAATCGCGGCCAAATCTTGCCCGT |
| | | | | CTATTATGAGTAACTGGCGCAAATTCTACTATGGTCCCGGGATCATG |
| | | | | GTCCTCTTTATGGTCCCGGGCAAATGTTCATCATGTAAAACTCAAAT |
| | | | | GTCAATGTTCATATTTGAAAATG |
| 1776 | Kochia | gDNA | 7214 | TAAGTGGAAGAGATGAAATGTCTAGTTATGGAATTATGGTTGATGA |
| | scoparia | Contig | | TTTTGGTTTCTGGTTTGGTAAACGGGGAATTCTCTGGCTAGTTTTGC |
| | | | | ATTGATGAACAAAGTCATTGCACCAAGCCACCAACTGTTTTCATTTG |
| | | | | AAGGAGGCTCCCCGACTCATGTATTTTTCAGCCATGAATCTCGATCA |
| | | | | AGTGATTAATTTGATCTTAGGTCATTCATATTGCTCTTGTTGTTCGCA |
| | | | | TGGTTTTTTTAAAACTTTCTAGCATTCAGACTATGGTAATTTCTTTTTT |
| | | | | CATGCCAACACTTCCATCATTTGTCATAACCTATTGCTTGACGAAGA |
| | | | | TTCTGTGTAATGACATGTGCTTGAGTTTCCACTTATTCACAACAACCA |
| | | | | AGTTGTGAGAAGTTGATGATTTATAGGGCGTGTTTGGCAATAGTAG |
| | | | | CTGGCAGTGGGCGTTTAGTTGTGGAAATAGTTGGTAGTGCTAACAT |
| | | | | TGGTAGTTAGCGGTAGTAGTAGATGTTAAGTGTCAACAAGGGATTA |
| | | | | TACAATCTAATAATTTGGCAATGGTAACAGTTGTATATATAATAAAA |
| | | | | GAAAAATGGTATAAGAAGAAAAAATTGTACCCGCTACATGACAAAT |
| | | | | GTTAGTCCTAGTGTTGAGCAATATTCTCTTTAAGTACTTACCTCTATC |
| | | | | CGAAACATTATTTTGCCAAACCATAATTTAAATTACCAAGTAGTGTT |
| | | | | TTGATCTAGCCATACCACTAAATGCTATCTTATACTCCTACGCCGATC |
| | | | | ACGCCCATAGCATAGGTGAAACTATATAAAAAAAAATGCTAATGAA |
| | | | | ATGCCCCTATCCCAAAACAAAATAAATGCATTGTAACCCAAGTATTA |
| | | | | GTAGATTTGATCATGGTATTTGGTTGATTTTGATTAATGGCTGTAGT |
| | | | | TCCCAAGTACAATAGGAATCTTCTTTGGTGAATGTACCCACGACCCT |
| | | | | GAAAAACCTTGAATTTTGCATTTATTGTAATCAATCAATCAATCAAA |
| | | | | GCCTTATTATCATATGTGGGGTCGAACATGAACCAAAAGTGATTATT |
| | | | | CCAGGAGGTCATCCATATAGATTTTCCTCCTCTATTCTCTACGATCGA |
| | | | | GAGCCTCACTCTTGCAAATCCAACTGTTTCAAATCCTTTCTAACTCCT |
| | | | | CCACTTTATGGTAATCATTGTATAAAAAAACAAAAAACAAAAAACA |
| | | | | AAGAAAGAAAAAGAAAGAAAGAAAAGAAAGGAGATCAAAGGGCA |
| | | | | TAATAGTTAATTATGATGCCAAGTAAAAAATTAGTCTGGGTCTTGG |
| | | | | GAAATAGTGATGTGACAATGAAGAGGTTAACGGATGATGGTTTATT |
| | | | | CCACTGGAATTTGTTTTAATTGTTCGTCTTTCAAACCTTGTTTGAGTT |
| | | | | ATTTAGTTGCCTTTTGGTGTTGTTCAAATCAATTTATTATCGTGAATT |
| | | | | TGTGATGACTGAGATAGGTGTTTTCACAACGTATTTGGTCTAGAACT |
| | | | | AGTCACAACTCGCATTTTGTTTGTGGTATGTGTAGTAGTGACGGTGT |
| | | | | TTCCACGGGAGAAACAGAGTTATGCTGCGTTTGCATGCATTATTGTT |
| | | | | TTTGGTATCATCTTTGTTTCTGATTCAATGTTTGGAATTGAAATGGA |
| | | | | GATTACTTCCTAGTTGTTTAAATATCTTATTTGTGATTCAGGAAGTTG |
| | | | | AGTTTGGTTTAAAATGTATGTATCTTTGGATTTTAGAAAAAGCCAAG |
| | | | | GGAGGTCAAATGCCCAAATGTGACTTGTGATGAAGGGAATTAAAA |
| | | | | GAGATATGGAGAAAGTAGGATCATAGAGCTCTGGATAGAGGTGAA |
| | | | | TGGAGGAAGAGGTCCTTATTGATGATTGTAACATATGAATTCTTGAT |
| | | | | TCATGCAACCGTTATTCGTTTGACAATATCAAAGCTTTGTTATAATTC |
| | | | | TTAAGGCTGTAGTGTTTCCTTGTAGAAATGCTGTAATCTGCAAATTT |
| | | | | TGCACATTTAATGAATTATATGATGGGTTATCTTTAAATTGTCTATAA |
| | | | | TCTTAATTGTGGTTGTTTAAAATATGTCTAAGGGCAAGACGACATAC |
| | | | | CATTTCAGTATTTGTTGGGGATGAGAGTGGAATGATAAATCGAATT |
| | | | | GCTGGGGTCTTCGCTAGAAGGGGTTATAATATTGAATCTCTTGCTGT |
| | | | | TGGATTGAACAAGGACAAAGCTCTCTTTACAATTGTTGTCTCTGGAA |
| | | | | CTGATAAGGTTTTGCAGCAAGTGATGGAACAACTTCAGAAGCTTGT |
| | | | | AAATGTTCTGAAGGTTGTCTTTTGCTTTAGATGAAAATTAATTTTGC |
| | | | | ATTGATGTTTTCCACGAAGTATTATCTGAGATCTATTCTCATGGCCTT |
| | | | | TTATTTATGTTTAGGTTGTAGATTTATCCAAGGAGCCTCAGGTAGAA |
| | | | | CGTGAATTAATGCTTGTTAAAGTTGGAGCTGATCAGAGTAAACGTG |
| | | | | CTGAGGTATCATTCACAATATGTTTCGGTTCCCCAAAAGTGGAAGCT |
| | | | | AGTAATATTATTCTTGCTTGTCAGAAAATTTCGTTTAGTTGTAGCTAA |
| | | | | TTATTTTGAAACAGTAAATTTGTTGTATGCTAATCTTCCGCCATCATT |
| | | | | CATCCTGATTGAACTTTACTGTACAAGTATCTTTAAATCTTTGAGCTG |
| | | | | AGTGAATTCTAATTTATAATGTTTGCTACTTATATAATAACTTTTGTT |
| | | | | ATTTCCTTTTGATACTGCAGTTAATGTGGTTGGTGGACATCTTCCGT |
| | | | | GCTAAAATTGTGGATATTTCAGAAGAAAATCTTACGATGGAGGTAT |
| | | | | CACTGGAAACATTATGCAGATTAAGACAAATTTCTAAAGAACTATGT |
| | | | | AATCATCCTAACGAGGATTGACTTCCAAGAATTAAACACATGTTATC |
| | | | | TGCTTTATTTTTCAGTAGTCTTTGATGCTTTAGGTGCATTTGAATAAT |
| | | | | TTCTGTTTTAATATATATTCTAATAATGTTATAGTTACTGTATGTGAT |
| | | | | TCTATGATCCAGGAGATGTAACTTATAAGTATTTTGTTTTGCTTGGT |
| | | | | GCATACCCATTTACTTCCTGGAAATATTTCATGTAGCTTGTGTCATTT |
| | | | | ATATACTTGATCAAACAAGGTCCGAAAGGAAGTCATTTGAGCAACA |
| | | | | ACTTTTAACAACCAAGGTCCCTTTTTTTTTTTTTTGAATAAAAAACAC |
| | | | | CACATTGGCCACTATATCAAAGATTTCATGTAGCCTGCCATATCTAC |
| | | | | ATGTAAAGAGTCAACTCTGCACGCAATGCTTTTTGTTCAATGTTTGT |
| | | | | GCCTTTGTGGTGTCATGGACCTCATGGTGTGGACTGTGGAGGAACA |
| | | | | AAAACTACATTTGGTGCCTACTTTTATGACTCAGGATTATGTTATCC |
| | | | | GTAATTTGCTAATATGAAAACAATGAGTTCATGGTTATTGTTTTAGC |
| | | | | TCTTTGCAACCTGAATTATAAGTTGTTTTCTACTAGCATTTGATGTTT |
| | | | | AATGTTATCATTTACATAGCAAGTTGAATATTTATAGGTCACTGGAG |
| | | | | ATCCTGGAAAGATAATTGCTGTGCTAAGAAATCTAAGCAAGTTTGG |
| | | | | AATTAGAGAAATTGCTCGTACTGGAAAGGTTTGTTTTAAGTTGTTCA |
| | | | | GTTTCTGCATTGCATGTCGTATTTCATTGAAGAGTTGGAAACTTTTC |
| | | | | ATGTATTTCTGTATATGATTTGAAATGTTGATATTATCCTTCACAGAT |
| | | | | CGCTCTAAGAAGGGAAAAGTTGGGTGAAACTGCTCCTTTCTGGCGT |
| | | | | TTTTCTGCAGCTTCTTATCCTGATCTTGGAGAAGCTATGTCTGAGGA |
| | | | | TGCCCTCCCTGAAATTTCAAGACGAGCTCCTGAGACTGAATCATCAG |
| | | | | ATTTATCTGTTGAAGTATGTTCTTTGATAGCTCTCCTTATTTTTGGCA |
| | | | | ACTAATTTATGTTTGTGTATTTACTTTATGCTTTCTTTTGATGAAGTCT |
| | | | | ATAAAGAACTTGACCTTCTGCATAGTTAGAAACTATGTTATTTAGAC |
| | | | | TCTTCATTTTACCTGAAGTACCCGTGTTGGATCCTTGAATCTCGGAC |
| | | | | ATGGGTAGACTCTCGGACATGGGTACGATACTTGGACACTTCATTTT |
| | | | | GAGCTAAAATCTTGGTATTTTTCCAAAAATTAGCCTAGTTGGACACT |
| | | | | TGGAAACGTACCCGTGTCGGACATAGGTATACATGTCCAAGTAACA |
| | | | | CATGTTAGAAATCTTTGGAGCTTGTTTCACAAGCTGTTAAGATTGCT |
| | | | | CAAGGTGTCAAGGCCTCATCTCACTTATTAATACAGAGTTGTTTTGT |
| | | | | TAGAAGTCTCAGAAACTTATAAACCAGGCTGAAATTTGAAAAGATA |
| | | | | GGCTAGTATAATACTTTGCTGTTTTTCTCTCAAAAAAGTTCTAAAAC |
| | | | | GACAAAGAGGGCTAGTAATATTAGAGAATTACTGATTTAGGACAAG |
| | | | | GGCTAATGAATGAGTCTTGATAAGTTCAGATAAGGGTCAATAAGTT |
| | | | | TAAATGAGGTTAGATAAGGGCTGAGAAGTTCATATTATGATAATAG |
| | | | | TTCAAATAATGGATTAGTGAAGGAACAAAGGTGAAAGATAGTGATT |
| | | | | TAAGTTCCTAGGGATGCACAATTACCATGATTATTGATACAACAACA |
| | | | | ATGCACGATTCTATAGCTGAAAGGGGATCTTTATGCTGCAATTCATC |
| | | | | TTCCTTGGGTCATCTTTTCCATTAAAGAGAATAATTTCCTGGTGAGA |
| | | | | AGAGAAATCACGAGAGGAAGTATGAAACTTCCTTATAGGACATAGA |
| | | | | ACAGATTGGACACTCCAGGAATGAAAAAATAATGCTCTAATGAACT |
| | | | | TGCATATCACCATATTTGTTGAGGCAAACTTAACTCCTGACTATATA |
| | | | | ATCATATAGTCAGACTGTTTTAGGATTCTAAACAATTGCAGATAATT |
| | | | | GTGTTCATGCTTGGTCGAAAAGTTTTTCTGCATTATATTTGAAACAA |
| | | | | ATTATGTCAGCAGGTGATAAATAAATTGTGCCATGCTACAGAAAGC |
| | | | | GAAAAAATTCATACATTGATTTATTTAAGGTAATTCTTCAGATTGTA |
| | | | | ATGTGTACTTCTACAGATTATGGAGCCTCCCACAATTGTTGTGAAGA |
| | | | | TGTCCACTGGTTTAGGATTGTTATGTCTAATTTTTTTTCCATGACCTA |
| | | | | ATTTATCACTTATTTTCGAAAATTGAACTGCTATTTCCACTATAATTC |
| | | | | GCTGCTTCTCCACTAATTCATATAACTTCTCCACTTAACTTCTCCTTAA |
| | | | | ACTACTTAATGAACTACTTTCCCCCTTCATGAAGATGTCTTCCAAGAA |
| | | | | CATGGAGTCCATGCGAGTCGTTTGCTGGCCATGGATTTGGGGACAT |
| | | | | CTTTTTGTCACGAATTTTGTATTGTATCTCTGTGTTATTGGGAATATG |
| | | | | CTACAAAGACACTATTTAGTGTTTGCCTAATTATATTGACTCAATGA |
| | | | | GATATACTTCTATAGTTATATACTTATATACTAATCAATGCCCATTCA |
| | | | | TGGGTTAAAATTTTGATATTACAGGGTGATGTTTACCCAGTGGAACC |
| | | | | TTTTGATGGTTTTGCAGTTCCACAAGTCCTTGATGCTCACTGGGGTG |
| | | | | TCTTGAACGTTGAAGATGTAAGTGACCCTCTTGTTTTCTTCAATTAAA |
| | | | | TTATTCTACATTTCTATTGTATGCTTTCAGGGTTTCTGTTCATTTTTTT |
| | | | | AATTAATTCTGTACTTAGGTCTCATTACTCTCTTAGTCTCTTGAGCTC |
| | | | | TTAATTTACAGCTGTAATGGCCCCCTCTTTGTTTCATTGCCAACTATG |
| | | | | TTGGCAGATGATGTGGGATAAGGCAATGATATTCTGAATTTAATTG |
| | | | | AATGTTGAGTAAAATGGATGTGTAGTTGGCAAGAAGCATTTGTTTT |
| | | | | GGTTGGGGTTAAGGTGTTTGGGCGGAAATTTAGTAACGCTAGCATG |
| | | | | AATATATTAAAAACCATTAAAATTTCGTATACTTGTATGAACTATGA |
| | | | | AGTATTTCCTTATCTCTGAAATTTCTCTGATAGCTGTACTAGCTATAT |
| | | | | ACAATGTCTACAAGTTTTAATATGGTTGAATTATTAAATTCATAAAG |
| | | | | ATGCTTAGCACAAAAATTTTATTTAGTGGTTTTTCCTATTCTAAACCA |
| | | | | GATAACTAAGTTCAGACTGCAATCAAGCTTAGCAGTAGCACAAAAT |
| | | | | GCTAGAAAAGCAAAACTTATTATAATTTCTTTTCTGTCGAGACTTTTT |
| | | | | TACAGGCTTATCTAGTTATTTGTGATGTTTGGTATGTCCACTCTATAA |
| | | | | TTTGATAGAATGATAGAGTAACTGTTTGCTATGTCCACGAGGTAACC |
| | | | | AATTGTAAAAATTTAAATGTATATGAGGACACTGGAGCAACCTAAT |
| | | | | GTTTGGACATATGTATGCAGACAAGTGGGATGCGATCACACACTCT |
| | | | | TTCGCTGCTTGTTAACGACAAACCTGGGGTCCTTAATGTTGTTACAG |
| | | | | GGGTTTTTGCTCGAAGGGGTTATAATATTCAGGTGTGAGTCAATTCT |
| | | | | TACTCTGCATGATACAATTTAAGTTCTGCTGTCACTAGCTAAGTTTAT |
| | | | | ATTGCTGATTTTTCTGGTTTTCAGAGTTTAGCTGTGGGCCATGCAGA |
| | | | | AGGGGAGGGTCTATCTCGGATTACTACTGTTGTACCTGGTACAGAT |
| | | | | GAATCAATTAGCAAATTGGTGCAACAAATTTATAAGCTAGTTGATAT |
| | | | | TCATGAGGTGAGAATATCTATTCATTTGATCGTTGTTACCCACAATA |
| | | | | TTTCTATTTTTGACTCATACTCATAATTTATTATATTATGCTATTTTAT |
| | | | | TTCTGACTTTAGGAAGCTGCAAACATGGAAAGAATTTTGTATGAGTT |
| | | | | TTGACGTCAGTATTTTAGTTGTAACGAATGTCTTTGGGTGTTTCTAG |
| | | | | CATGTTTGAAAGCTAATGTTATTTGTTTAAAATTTAATCTATTTATAT |
| | | | | TTTTATCCAGGTTAGAGATATCACCCATCTGCCATTTGCTGAGCGAG |
| | | | | AGTTGATGTTGGTGAAGGTTGCCGTGAATACTGCTGCACGCCGTGA |
| | | | | GGTCCTTGACATTGCTGGCATTTTTAGAGCTAAAGCTGTCGATGTAT |
| | | | | CTGATCATACCATAACACTTGAGGTAATAATCAATTCGGAAGGTTGC |
| | | | | TCAAAAATATTGTTGACTCCGTTTCAAATGCAACTTTTTTAATTTGAT |
| | | | | GTTTTGATATAATTGCTACCCTCTTGTTTATAGCATGTTTTAAAAATC |
| | | | | AAAGTTTGGGCAATTTTCTTAACTATCTTAACTACAGTACTACCTCTG |
| | | | | TGTTTTTTAGATGTCCCACTTTGGGTTTTGTGATTTTTAAGGTAACAT |
| | | | | TTTGGTGTAGGTGATTAGGTGAGTAGATGGGTAATTTAATAAAGTA |
| | | | | TGTGGGACCCATAGA |
| 1777 | Kochia | gDNA | 5508 | TTTTTTTTTTGACGCGGAAGGATCATTTTATTCAAATATAAGCCTTCT |
| | scoparia | Contig | | TAGTATCTACATCATCAATAGAAAAGAACTCAAAAAGACTTAAAAA |
| | | | | ACAGAAACGGAACTATAACCACAACACCTAAACTTTAATCTAATCAA |
| | | | | GCTCAACTCCACGAAAGTGCATACAATCATGTAAACATGATAAAAT |
| | | | | ATCGACGTCAAAGCATATTTCAATAGAATCTACACCACCGGTGCTGT |
| | | | | AGATGTTATTGCAAAAGCAATCGCCCCGTAGATCAAACCCTTTAATT |
| | | | | TCATTCATTAGTATCCTTATTTGGTCATACTCTTGCATTTTATTTAGAT |
| | | | | GATATTCAAAAGGAGCAATGCATTGGGAAATTCTCCCACCTTAACA |
| | | | | ATGAGGGATAAAAAAAGCACCTATTAGGTGACTTTTGAAGGCTCAT |
| | | | | GCACTATAGAATTTGCGTCTTTGTTTCATTTATTCTTTGGTGTATAAG |
| | | | | TGAAGTTTATTGCTTACTTGATGGAAGGTTATCTCATGTCTATAATA |
| | | | | ATTTTTGAGAATTCTAGGTTAAGGTATGAGAGAGGAGTAAACTTCA |
| | | | | ATTTCCTGACTCTTTGTAGTTTGTAGAAGTCAATTCCCGATGTATCCC |
| | | | | TTCTGTTGTTTTGCTCCTCAGTCTAGAACCCTGTGTCACCTCCTTTCT |
| | | | | GAATTGGGGTTTTAAAGAGAGTTACTGTATATAGTTTGTCAAGTTAC |
| | | | | ATTGCCCCAAATCCTTGAACGGAAGTCAGTTTTCCTAAAGAATGTGG |
| | | | | TTCTCTCATTGAGTCTTGCCATGTTTTTCCTATGTATTTAAATCTCTGT |
| | | | | TTGGGTAAAAATGAAATGGCTATGCAAGATGTTGAGGTTTATATAT |
| | | | | TTTTATATTTCATATCCAGGGTGATGCGCCACACGATTTCAGTTTTTG |
| | | | | TCGGTGATGAAAGTGGGATAATCAATAGGATTGCTGGTGTTATTTC |
| | | | | TAGAAGAGGGTACAACATAGAGTCTCTCGCTGTCGGATTAAACAGG |
| | | | | GATAAAGCTCTTTTCACTATAGTAGTGTGTGGTACTGAAAAGGTGTT |
| | | | | GCGCCAAGTTATGGAACAACTTAACAAGCTTGTTAATGTTTTGAAG |
| | | | | GTAATGATCTAATTTAAACTTGTATTTAAGTCATCTCTGATGCCCTGA |
| | | | | CAACGCTGACGTTGGTGTCATAAAGATCTTTAGATTGTACACGGCTT |
| | | | | ACAACTTTCACCATTTGGCGCGTAGTAAAGAAACCTGAATTGCCCAT |
| | | | | CAGATCTTCTGATCAATTGAATTTTGAAAATAGATATATAATGGTGT |
| | | | | ATTATAATTGTGGTTATCCTATCCATGTATGTTTGTACATGGTAGTG |
| | | | | ATGGTACATTGTCTTCACAGTAATGCTGGAGAGCGTAGGGCTTGTG |
| | | | | TTGCTACCTATTGTTTAATTACTCCCGTCCGTGTAGGTTGAAGATCTT |
| | | | | TCAAGAGAGCCACAAGTGGAACGTGAATTGATGCTTGTAAAACTGA |
| | | | | AAGCAGATGCAAATTACCGTGCTGAGGTATTTCAACAGTTTTGGTTA |
| | | | | ATTCTCATAATGGCATAATTATCACTTTAAATGTTTTTTCGTATTCAA |
| | | | | TTGTCAGCTGGTAATGAAGAAGAAATTGCGGTTAATCATAAGAAAA |
| | | | | ATGTTCACAGAAAGCTCAAGTTCTTCGGAAACTTTATTGCATAAAAG |
| | | | | TATTGTTTAGAATATGTCTTAATTCCAATTATTGCGTAAGAAGTCTCA |
| | | | | AAAATCACCAATTACCTCACAAAACTCACCCTTTCAATAATTAACTAC |
| | | | | CTATAATAGTCACTCCTGTTTTACTGTACTCCCCTTATGCAGTTATAT |
| | | | | CCATCTTTTAGTATGTCCGTCTCTCTCCATCTCCATGAATTATATGAT |
| | | | | CCGGGATTTAGTTGCACGTTATCTTCAGTTATTATTTGTAATTTGCTA |
| | | | | TTATGCAATCACAAATGAAGGTTTCAGAATCTTTTTCACTTGAACAT |
| | | | | GAAGTCAACTTGTGAATTGTTTTTAAGTATCTGTTATTACTAAGGAA |
| | | | | AGTCACGGGCATTAGTAAACTCACATTCCTCTATTGTGCAAATTTTC |
| | | | | ATGAAACATAGCCATCAATATTCGGTATTGGAGTGGTTTCCCATATT |
| | | | | GTATACACAAATTTTCACATGATTGTGTGACACTCAATTATTAACTCT |
| | | | | CTATTTGCATGGCTTTTTAAAAATATATATGGATGGGCGGAGAGGA |
| | | | | ATCTATGTTAGTAGTTATCTGCTCTGTGCATTGGTCAGTTAAGGATG |
| | | | | CTGAATTACCCAAATGTTCTATTTTTTTGGATCTGCAGATAATGTGGT |
| | | | | TAGTGGACATTTTCAGGGCAAAGATTGTGGATGTGTCAGAAAATTT |
| | | | | AGTCACAGTTGAGGTGAGTGATTGATGAATGGTTATTTTGTGTCCT |
| | | | | AAACTGATGCAATTTACTGTGCTAATGTTGTCTTCATGTAAATCATAT |
| | | | | CCAATTATATATAGCTCGATGTGTAAGCTCTAGATTTTCATATTGCA |
| | | | | GCCTACTCTATAAATTGCACCTTTTATAATAATGTGGTTAGTAAGAC |
| | | | | TAAATTCTCCTTTTTATTGTAGACTTAATAGTTTTACAGGCCTTTTATC |
| | | | | TGGTGCTGTGCAGGTGACTGGGGATCCTGGAAAGTTGGAAGCTGT |
| | | | | CCTGAGAAACTTTCACAAGTTTGGAATTAAAGAAATTGCAAGGACA |
| | | | | GGAAAGGTTAGTCTTTTTGTCACTTGAATAGAAGAATCAGATAGAT |
| | | | | GGAAAGTATACAAGTCATAGTACTGAGAAGGAAAAGTATAGTTGG |
| | | | | AGTAAATAGCTTTATAGTCTACTGTTGATTTTGTAAACGAATTTTTTC |
| | | | | AATGCTAATTCTCAGTGAGACCAATGAAGATAAAGGTTTTTGATGTT |
| | | | | TTGAATGTGTGACAGATTGCTTTAAGACGGGAGAGGATAGGTGAG |
| | | | | ACAGCTCCATTCTGGAGATTCTCTGCTGCTTCTTATCCAGATCTAGA |
| | | | | AGAGAAGGCCTCTATTGCTGTTGTTAAGTCTGCAGAAAGAAGTATG |
| | | | | AATGGTAATGCTGGCTCATCGTTGAGTGTAAGTAAAGTTTCTCCTAC |
| | | | | CGAAAAATCATCTCATTCCATTCTCCCCATTTGTCTCTTCTATGAGCG |
| | | | | TCTTTTCTTTGTCGCTTTAACTTTTAAAGAACATATGGACTTTTATAT |
| | | | | GCTTATGATTTGCAATCCTGCTTGATTTTATTTCATATTTTCTATCTAT |
| | | | | AACTTGTGATTGCTTGTCATGAATTCAATCATAAGCTTTGTGTTTGAC |
| | | | | AATTTGTATCTAAAATGTTTCTTTTGTTCTCTACAGGGTGATGTTTAT |
| | | | | CCGGTGGAGCCTTATGATCTTTCTCCAGCACATCAAGTACTTGATGC |
| | | | | TCACTGGGGTGTCCTTTATGATGATGATGTAAGCTTTATTTGTTGCT |
| | | | | TCCCGAATTTTTCTTGTATCGTTGTCGTGGAATTTGCATAAATTGTGA |
| | | | | AATTCAAGCTTATACTCAGTTGTTTTCATCTGAAGGGTCAAGTTAAA |
| | | | | TGCCTTTGGCATGGTTTTTCCCCCTTTCTAGAGTTGGGTCGTTTTGCA |
| | | | | ATTTGATTTTATGATGAATTTACTCTGCTAGATTTTTTTATGTGGGAG |
| | | | | TGCTTTCCTTTTTCAATTTTCAGTCAAGCGGGCTTCGATCACATACTT |
| | | | | TGACCATGGTAGTTAATAATGTTCCTGGAGTTCTCAACACTGTAACC |
| | | | | ATGGTGATTGCTCGTAGGGGTTATAACATTCAGGTCAGTATGACTCT |
| | | | | CACTGTATGTATTAAAAATATGTATAATGCATTTTTTTTGTGATGTGG |
| | | | | TCTCATATTTCCTTTTCTTCCCCATCCTCAGAGTCTTGCTGTTGGCCCT |
| | | | | GCTGAGAAGGAGGGTCTTTCTCGTATCACCACTGTCGTTCCCGGAA |
| | | | | ATGATGAATCAATTGGAAAATTGGTTCAGCAACTGAACAAATTGGT |
| | | | | AGATCTATATGAGGTGAGATTATATGTGTAGTGGGCATGTTGCCCA |
| | | | | AGTAAGGTAGTTTTAATCCATGCTTATATATTTTTAGGAAAAATTAA |
| | | | | CAAAAATAATCCGACCTTTCAGTGGTCTTCCAAAAATAACCGGACCT |
| | | | | TTGAATAATCCCAAAATAATCCCACCTTTGCTCCCCATCTTCCAAAAA |
| | | | | TGGTCCCTTACCGGTTTGTGACCTGTTGACTAGGTTAATTTGCAACG |
| | | | | TGTTGCTTCTACATTGGCTGTAATTAAATTTAATCTAAATTAATCAAC |
| | | | | ATTTAATCATAATTAAATATAAAACTAATTATAATTAATTAAATTATA |
| | | | | ATTATAATACCATCCCTCACCACCTCCTGCCACCACGCACCACCTGCC |
| | | | | ACCACCACACATCACTTGCCACCATGACCCACCAACCACCACCTCAA |
| | | | | CCATGCACCATCTCTCTCCTCTCTCCTCCCTCACCACCACACCAACCA |
| | | | | CCATCGCCACACACTGAAACTACCTACTCAAACCCAGGCCACAACAA |
| | | | | CCATCACAATCACTATTCTCCCAAAATATGGCGCAAGGAATCAATAC |
| | | | | TTAACGCCGCCTTAACTGGCGCACTCTCGTTCAGAATGCTCTTTTCTT |
| | | | | CTCCAATCTCAATTGTTGCTCAATCTCCTCCTAATCAGTCATCTTCTTT |
| | | | | TGTCGAAGACTGTTGCAACAATGAGTTTCCATTGGTGGACGAAACA |
| | | | | TCATCATCATCGAGTAATTTGAGAACTAATGAGGGAATTGCAAAGG |
| | | | | AAGCATGGGAGAGGGGGGCTTAATTTTTCCATATTTTTATTGTAACA |
| | | | | ATTTTGACCCTACTATTTCATGGAAGAATCTCAATTTCTTATGGAAAC |
| | | | | CCAGTCTCATTGGTGCAATGCAGTAGTTCAATTTATTTTAGCTTTGCT |
| | | | | TTTGTGTGAAGTAGTGATTAGGAAAATCATTGGTGTTGTCATTTGTC |
| | | | | AGAGTTTATCGGTCGATCCTCCTCCTTGCAATACCTTAATTCTCAGTT |
| | | | | GAATTACCTGTTTTTGGTAACATTGTTTGGCATAGATACTTAATATTT |
| | | | | TTCGTATGACCTTCCATCCTTTGCCTTGGCCCATTGTTCCAAGGTCCG |
| | | | | GGTTGATGGCTCAACATCATGGTCAGCAGGCCTCATCAAATATTTTC |
| | | | | AAACATTTTATACTCCATAGTTATTTATTGATCATGATAGCCTGTGGT |
| | | | | CTGCACCTTCTGCCTTGTTCTGGTCTCCAAGAACCAGTCTAGGCGCA |
| | | | | GCACATGGACCATTCAGGAAGGTGCTGTGCTAGGTTGGGACATGA |
| | | | | AAATGCTGGCCCGCTTGCTAGCATGGCCAACTGCCTGCTTTAATTCC |
| | | | | TACTCTTCATCAAAATTGTGACATGCATATTGTTTCTAGAACCAAACT |
| | | | | GTGGTGCTACGTCTAAAGATCTGTCAATCTAACTATAAAAATGCTGT |
| | | | | GCCTGCAGATTCAGGACCTTACACACCTGCCATTTGCAGAGCGAGA |
| | | | | GCTTATGTTGATCAAAGTAGCTGTAAACACTTCTGCCAGGAGAGAT |
| | | | | GTCCTTGATATTGCCAATATATTCCGTGCAAAAGCAGTAGATGTTTC |
| | | | | TGATCACACCATAACCTTACAGGTATGCCATACACGAGATGTTGTGC |
| | | | | TTCACTCTTTTTGCACTTGCAATAATGAGGTGCATCTT |
| 1778 | Kochia | gDNA | 2741 | CATGTCTTGAAAGGGAAAAAAATCAAAGTGGGACAACTAATTCCAA |
| | scoparia | Contig | | ACTTCCTAAAATAGAAACTTGGACATCTAAAAAAAATGGAGGAAGT |
| | | | | ATATTTTTACTATTTTCTTATCTCTTGTAGCTAGCACTTTATTTTCTGT |
| | | | | CCTTATTCCTTGCTTGCCAAGTTTGAGTGTCGCCATATTTTTTGACCA |
| | | | | GAGAAAGTACAAACTATTCTTTGTCTGTCCCAATTTTCTATTTCTGAA |
| | | | | ACCTTTCTTGCATGTAAAGATTCTCATTCTACCTATTGAAGATAAATA |
| | | | | TTGTGGAAGGAATGATCCATGGAGAAAAACATGGCTTGAAGTTGA |
| | | | | CTAGATCTTCTGAAGATTTTTTTTTTAATACATTGATGAACTCATGCA |
| | | | | CTTGAATTTTCCTAAAATGGATTTAGCATCTCAATGAATAGCATTTG |
| | | | | CTTAATCATTCTGTTGATAGTCACGATACACTGTACAAAAGCTGATT |
| | | | | CTAATTGTGATGCTTCTGACCGACTGACTCCCAGCTTACCGGAGATG |
| | | | | TGCATAAGATGGTTGCTCTCCAAAGATTGCTGGAGCCCTATGGAAT |
| | | | | ATGCGAGGTAGGATTTCTGTACATTGTCTAAGTTGCCTAGTATGTCA |
| | | | | AAAATATCAGTTGTTTCTTGCTCGGTTCTCACATCATCTGTATTGACA |
| | | | | TTATTCAAATACCTGTAAAGGAGGATTTCACTGTAGATATGGTGGCT |
| | | | | TTGCACTTACTTTTCGACCAAAAATCCACTATCATGGAGACTACTCTT |
| | | | | TATTCAGTACATCAACAAACATTTAATATGAATGGATAATTGGATAC |
| | | | | TATGAGTGAGATGTACTCTTGAATATGAATGGATAGTATGAGATGT |
| | | | | AACGTTTAATATGAATGCTATACACTTGAATATCTGAGGATATCTGA |
| | | | | CTTGCCATACTGCCAGTTTGCTTCCTCATAGTAGTATTGCATCTTCTT |
| | | | | TTACACTACATAGCTTGTTACTGTATTGTTTTAAATGTCTTAATAACT |
| | | | | GCATACATGTTTTTGTAATAATATAGGTTGCGCGTACTGGGCGAGT |
| | | | | GGCCTTGGTTCGTGAGTCTGGCGTAGACTCGAAATATCTTCGTGGA |
| | | | | TACTCTTTTCCCGTATAAGTGTCTGAGCAAAAAAAATACTTCGGGAG |
| | | | | GAAGGCATTCGAGTTTTGTCAGAATATACTTTTGCAATATTTTCTTTA |
| | | | | TTGTTTTTATAGGTAGAAAGTAAGCAATCTTGTAACCTATTTTTGTTG |
| | | | | TTTGCTTTTGTAGAATTTTTTTCAAACCAGAAAACTTTTGAGAATTGA |
| | | | | ACAAATGAAGTGTATTTCTTTCTAAGGTATATGTTCTCTATCCATTGC |
| | | | | CGGTTGGTTTTCTTCCCATTTTTGTGTGTGTGTGTGTGTGTTTGTCGA |
| | | | | TACTTGTGAGCGGTACTATGGAGCTCGATACTTGTACGTTGTTCAGA |
| | | | | TGTTGAATAGTAATATACGAAGTACTCTGTCGTATCTTTATGTTTATC |
| | | | | CATATTTTTCTGCAGATTAAGTTTACTGTAAATCATAACCTTGTGCTC |
| | | | | ATGATGAGCGTCCAAATCAGATTTTCACATGCCAAAACTATATGATG |
| | | | | CACTTCTTTCACTAGTGTATCATATACAAGAATAAGTTTAATGACAA |
| | | | | CCCACCAAATTAAATTTTTTAAAATAAGTTTAGTGCGTCCTCAATAAT |
| | | | | ATTTAATTTTTATAATTTTTGAAAATAAAATGGACATTGACATATGTA |
| | | | | ACGAAGGGAATACTTTTGGGGTTTAATTCATTTAATTTAAAAAAAAG |
| | | | | TAAGTTGAGACTTGACAGCAGGACCAACAAATCGTGATGATGCGAA |
| | | | | ATTGTGAATGACACGATGTTTGTGCACTCTCCTCCGTCCTCAGTCCA |
| | | | | AAACTCAATCACTCAAATCTGAAATATTCACCAGAGCTTAACCACAG |
| | | | | CTTAATATCAGCACCAAGTCAGTCGTCACAGCTTCCGACCACCACGA |
| | | | | CGAGGTTCTTTTTGCTGCCTTTGAGCCTCTCATTTTTGTTTTTGTCAT |
| | | | | GCAACTTTATATTTCAATATTTATATTTATATTTTGAGGTGTCAATAT |
| | | | | TGATAGGATCATAAACAATTATACATAAGGTTTGAAGGCGAATCGA |
| | | | | ACAAGATTTCCTATTACTCCCAGACCCAGTGTAAAAAACTAAACAAG |
| | | | | TCAAAGTTTATGAGTGAGTCAATAGTATCAAAATATAGCAACAAAC |
| | | | | AAGATTCCAATGTTGAAGTTCATTTTGTAGAATTGTGGCTGAAATTT |
| | | | | CAATTAAACTAGTTACTTTGTTCAATTGTCAGTTAAAGTTTTGCCTAA |
| | | | | ACATTGCTTGTGCAGCTGTTTTTTTAGTTTTTGTTTTTTGCATCTTATT |
| | | | | GATGGTAGCTGTTTGATTATTCTGATTTTATTGTTCATACTTAATTAG |
| | | | | TATTACTGAATTTGATTTATGATTTTAATTGCTATTATTGTGTTTGATT |
| | | | | GTTTGATGTCTATTTTGAGTCTAACTGAATAAATTATAACTACGAAG |
| | | | | TATTATTTTTATGAATCAATTTATTATTTTTCATAGACAATTAGAAAA |
| | | | | ACAAATAATCAACGACCTATTCATCCTGCTAGCTTAGTACTTGGGAC |
| | | | | TGACAACTTTGATGAGAGAAAAGAAGAACACAGTTTAAATAGTTTT |
| | | | | AAAAATCAACATTAACTAAATTATAGATAGGGGTAAATGAGATTCG |
| | | | | AACGTCTAACGTACTTGTCAGGTTGGCTATGGTTGAGTTGAGATGG |
| | | | | TCTTTTAATATTATCATGTATATGACTCTACAATTTGTTATGCAGCGC |
| 1779 | Lolium | gDNA | 1203 | AACAGTATTATAAGGACTAGGGTGTTCCGTGTCTTATGCTGGATTAA |
| | multiflorum | Contig | | ATTTCTTGATGCTGATCTGGCAAATGCTGCAGGTCACTGGAGATCCT |
| | | | | GGAAAGATTGTTGCGGCACAAAGGAGCCTAAGCAAATTTGGGATC |
| | | | | GAAGAAATTTGTAGAACGGGAAAAGTATTTTTCTGGACCATTTGCT |
| | | | | ACGTACATGCATGGGCACATTTCTTCATTGTCTAATTCTTCTATCTCA |
| | | | | ATGTTCTTAGATTGCTTTGATTCGTGAAAAAATTGGAACAGCTGCCC |
| | | | | GTTTCTGGGGATTTTCTACTGCTTCTTACCCAGACCTCATAGAAGCA |
| | | | | TCGCCCAGAAACCCTCTTCTTACTTCTCCGAAAAAGACGGTTAATGG |
| | | | | CAGTTTTGATCAGCCATCCAGTGCTGGGGTATGTTTCCATGAATATA |
| | | | | AGACCAACTACATATTTATTGCATATTCCTTCTTGTTCTGCTTCAACT |
| | | | | GTTCTAAAAGCGAGGCAACACTTAGGCTATAGGTGCCACAGTCTGC |
| | | | | CTAGTACCTTTTAAAACGCTGTTACTCCCTCCGATCCAAAATACTTGT |
| | | | | CCAAAAATGGGAGAATCTACACACTAAAACACGTCTAGATACATGC |
| | | | | ATTTTTGGGCAAGTATTTTGGACCGGATAGAGTATTTGTAGTTTTAA |
| | | | | ATACTTGGTAATCTACACCACGCTGAAAAGATGCCCCTTTTACATGA |
| | | | | ATGACACAATCAATAATTTGATGTGCAATAACAGAGAAGATCTCAC |
| | | | | GAACTCTGCATATCTTTAATAGCTATAGTGTAAACAAAGGCAACTGA |
| | | | | ACTTCTCTGTCACCAGTAAACATCCCAGTGCAGCCGTAGCACTGTAA |
| | | | | GTGAATTTATAGATGAAGGTAATTTGTATACCTGGCCTTAGGAAAG |
| | | | | CAAAAAAAAAATTGCTCATACATCGAGGGGAGATACCTGCGTGCTG |
| | | | | ACAAAACTAAAAACCACACAGAGATACTCATCCCCACGCAGGCAGG |
| | | | | GATATAAAACAAATAACCAGATTAAGTCGAACATTCCTATCGTTTCC |
| | | | | ACTACATCAGACACAAACGCCCCTCAAAGGAGGCCAACATAAATAT |
| | | | | TTCAGCTTCCTAGCTTGAAGTTGAAGTCTGATCTGCATCTTTAACAT |
| | | | | GAAATCCTGGTATGTAGTCTTCAGCGACCCCAACATTGCTGCATAGA |
| | | | | AAATATAATTTGGTAAATGAGCGACACAGGATTCA |
| 1780 | Lolium | gDNA | 1074 | ACTGGCATGGTTATACTTCTTGAGAAAATATTATAAGTTAATTCTTCT |
| | multiflorum | Contig | | TTTATTTCTAACTAGATCTAATGAGCCTTATTAATGTAATAGATAGCT |
| | | | | TTGCGGCGTGAGAGAATGGGACAAGCGGCTCCCTTTTGGAGGTTCT |
| | | | | CTGTAGAATCCTATCCTGATCTTGAAGTGAAAAGGCCTTCAGAATCT |
| | | | | ACCCTAAGCACTCAATCAAAGACAACCAATGGCGACTCTGAAGAAT |
| | | | | CTTTGCAGGTAGGACATGGTAATTCTCATCATTCATATAATTTTTCAT |
| | | | | GTATCCATTTTTTCTTTAGCATTGCACCAACATTGTTTCCATTTATTTT |
| | | | | GTACCTGGATTGTTGTGTTGTTTGAATTCTTTTCATGCATTCAACAGA |
| | | | | AATCAACACGTGCAATAGAATACTCTCTCTTCCATTCTTCATTAGTAA |
| | | | | GGTTGTTCTTTTCTGATTTGGTCTTAATGGGGATTTATTGTTGTTCAT |
| | | | | TTTATTAAGATATGTCCTAAATATATTTCTTCCAATCTGAGTTTACAA |
| | | | | GGGAAAACAATATATAGACTAGATAATCTACCAATATTAAATCCTTG |
| | | | | CAAGTGTACCTTCTATGCAATGCGTATTGATGCGATTAGCTACATTT |
| | | | | GCCTATTTAATGCATATGTTTAGTAGACAAGCACAACTTGATGCGTC |
| | | | | ATTTAAATTGTTTGTATGATTCATAGTATCAGCATTCTGTTGACAATT |
| | | | | ACTTGTTTTATTTTAGAAGTTGTAAAAAGTTGGCTATATTATATAGCT |
| | | | | TAACTACATCTCACAAACAATGGTAGAAAATGACCATTACTAGTTTG |
| | | | | TTTTGTGTAGACAATTTTATTGCAGAAACTTTTTCTATTATCCACATA |
| | | | | GTTTTTTTTGCAGTTTGATGATTGATTTATATATTCTTATGTTCTTATT |
| | | | | ACTAGGGCGATGTTTATCCAGTGGAATCTTATGAAAGCTTCTCGATG |
| | | | | AATCAAATTCTTGATGCCCATTGGGGTGTGATGGCTGACACTGATG |
| | | | | TAAGTTCTTGCATTCTTCTTTCACAAGAGCTGCTGTGTTGCTGAAAG |
| | | | | TTAATGGCAAGCGTCCCAAAGTCTAGTGG |
| 1781 | Lolium | gDNA | 838 | AATGGTCGCATTACAAAGGATGCTTGAGCCGTACGGCATATGTGAG |
| | multiflorum | Contig | | GTTTGTACTGAACGTTCACTTTGCAAATGCGCCATAGTAATGATAGT |
| | | | | TCATGATTTTAGAGTACTTATTCCAATGTAAATTGTGGTTTAGCTACT |
| | | | | GCAATTACTGATTATATGTAGTCGATCCTTTAACCTCCTTGGCCATAC |
| | | | | GTATTCTGCAGATTGCACGAACTGGCAGGGTTGCGCTGAGCCGTGA |
| | | | | GTCAGGAGTTGATTCTAAGTACCTCCGTGGGTATTCGCTTCCTCTAT |
| | | | | AGCGTGTCAGTTGGCGAGACATCACGCTCTATCACTTTGCAGATTGC |
| | | | | CATTCTTCCGATCTCGGATCTCGTAAACTCTGAATATGGAATGGTGT |
| | | | | TTCATTTCTTTGGGAGCATACATCAAGAACACATTGGTCATAGTTAG |
| | | | | GATTTTTTTTTGTTCTTTTAGATACCAGAGAGAAATGGAGTTGGGAT |
| | | | | GTTTGAATCCTATGTGAATACAGGGTGGGAGAAGAAACTCATCCAT |
| | | | | AGTTTGCTTCTAGCGTCGCTGAGGTTTTATGATTCCCTCTTCGGGGT |
| | | | | GCTAAGCAGAATTAATTTTCTCCGACAGCCCATCACGTGGCTGCTAT |
| | | | | ATGTACCGCGCGGAGAGGTGTATACATCCAAAACCGTGTGCTTCCC |
| | | | | CACCGCTTACTCCTTCTCTCCGCCGCATTCTCTAACGTGATTTTGACG |
| | | | | CCTTCGATCGTGCTTGTGACCTAGAGATTCGGCACCCCATGATGCAC |
| | | | | GATGTGGTCGAGGAACTTCTCAATCGGAGTAGGGGTTGCTGGCCA |
| | | | | GGTTGCCGGCATCCCCGTGTGGCTGTGGAACCCTGGCCACCC |
| 1782 | Lolium | gDNA | 651 | GCCAGGAGAGGGTACAACATCGAGTCGTTGGCCGTCGGGCTGAAC |
| | multiflorum | Contig | | AAGGACAAGGCGCTGTTCACGATAGTGGTATCCGGAACAGAGAAA |
| | | | | ATACTGCAACAGGTTGTGGAGCAGCTCTACAAACTTGTCAACGTCA |
| | | | | TACAGGTCAGTATGTTCCTCCAATAAACCACTTGAATTACAAGATCA |
| | | | | TTGCTAACTGATACGTAGTAATGCGCCGTCAATTGAATCGTTCATTT |
| | | | | CATTTTTCGTGCTTGTTTCAGTCGTCAGATCCTCTGATATTCGTAGCT |
| | | | | TTGTATATTGATGAAACAGGTTGAGGATTTGTCAAAGGAGCCACAA |
| | | | | GTTAAAAAAGAGCTCATGCTGATAAAGCTGAACGTAGAGCCAGAG |
| | | | | CAGCGTCTTGAGGTAAATTTGTATGCGCGTAGGATGCTCGATTATAT |
| | | | | GCTTCAGTTGGAGTGGAGGTGAGGGTAGAATGCTGTTACTCTTTGC |
| | | | | TTATTTCTCCACTTGTACGTACATGCAGGTGATGGGTTTGGTTGACA |
| | | | | TTTTCAGAGCAAAAGTTGTTGATCTTTCAGACCGGACACTGACTATT |
| | | | | GAGGTAAAATCCATGGTGTGTTGTATCTTGCTGATCGCTTACATTGC |
| | | | | CACTTGTATGCTTTTATTAAAGCAAATTATGCGCTCTGTTTTTTGAGT |
| 1783 | Lolium | gDNA | 487 | ATGTAGTTCCAGGCTATTTTTCAATGAAACCATACTACTTCCCAGAG |
| | multiflorum | Contig | | TCTTGCTGTTGGCCGAGCTGAAAAGGAAGGCATTTCACGTATTACA |
| | | | | ACAGTTGTTCCCGGAACTGATGAATCCATCGAGAAGTTAGTTCAGC |
| | | | | AGCTTTACAAGCTTATTGATGTACTTAAGGTAAATGGCATGCAATTT |
| | | | | CTTAGGGCAATCATTTACGATATAAAATATGTTGTGTAATGCAAAAC |
| | | | | ATGTGATTGTCCCAGGTTGAGGACTTGACTCACTTACCTTTTGCCGA |
| | | | | AAGAGAACTGATGCTTATCAAGGTATCTGGGAACACCGCTGCTCGG |
| | | | | AGGGAGATACTAGATATCGGTCAAATCTTCCGGGCAGAATGTCTGG |
| | | | | ATCTTTCTGATCACACAGTTACGTTAATGGTGAGCTTCTGGCTTTATT |
| | | | | AGGTGTTGTTTGTTATTGTTGATTTAGCTTTACCAACTCTCAAGTGTG |
| | | | | CTATGGTGAGTATTAAAGC |
| 1784 | Lolium | gDNA | 475 | GTTTTGTTCACATACTTTGTCAATCCTTGTGAATGATTTCCCTGGAGT |
| | multiflorum | Contig | | TCTCAATGTTGTAACGGGTATCTTTTCCCGAAGGGGCTACAATATCC |
| | | | | AGGTTCGTTTTCCATTCGTAGATATCTTATGTTCCCTCAATTAGATCA |
| | | | | CTCCAGGTTAGTGTTGCGGTTCATTGTTTACAGACGTGCCCATTACT |
| | | | | TTGACAGAGTCTTGCTGTTGGTCCAGCTGAAAAAATAGGCACTTCTC |
| | | | | GCATCACTACTGTCGTTCCTGGGAGTGATGAATCTATCGCCAAGCTA |
| | | | | ATACATCAGCTTTACAAGCTCATTGACGTTTATGAGGTCAACTTATT |
| | | | | AATGTTGTGGTTTGCATGATTTTTTGTTGCCTATGTAAGGTTAGCTC |
| | | | | AAATTCGCCTTAGTTTTTCAGGTCCAAGATCTTACACATTTACCGTTT |
| | | | | ACTGCTAGAGAGTTAATGATCATCAAGGTCGCTGGGAACACCTCAG |
| | | | | CTT |
| 1785 | Lolium | gDNA | 373 | CGTGGCAGGTGATGGGGTTGGTTGACATTTTCAGAGCAAAAGTGG |
| | multiflorum | Contig | | TTGATCTTTCAGACCGGACACTGACTATTGAGGTAAAATCCATGGTG |
| | | | | TGTTGTATCTTGCTGCTCGCTTACATTATCACTTGTATGCTTTTATTA |
| | | | | AACCAAAGTATGCTCTCTGTTTTTTGAGTCATTCCAAAGGTAACTGG |
| | | | | AGATCCTGGAAAAATGGTAGCTGTACAGAGGAACCTGAGCAAATTT |
| | | | | GGGATCAAAGAAGTTACTAGAGGTGGTAAGGTTATAATTCTTGAGA |
| | | | | AAATATTAGAAACTTATTCGGCTTTTGTTCTTGGCTAGATCTAATGG |
| | | | | GCCTTATTAATGTGTAGATAGCTTTGCGGCGTGAGAAAATGGGACAA |
| 1786 | Lolium | gDNA | 343 | ATGTGCACTAAATTGCAATTTAAATCCCCATTTCGAAAATAACTGGC |
| | multiflorum | Contig | | ACACTTTTCTTTCTTCAGCCTACAGGGTTTTGTTCACATACTTTGTCA |
| | | | | ATCCTTGTGAATGATTTCCCTGGAGTTCTCAATGTTGTAACGGGTAT |
| | | | | CTTTTCCCGAAGGGGCTACAATATCCAGGTTTGTTTTCCATTTGTAG |
| | | | | ATATCTTATGTTCCCTCAATTAAATCACCCCGGGTTAGTGTTGCGGT |
| | | | | TCATTGTTAACAGACGTGTCCATTACTTTGACAGAGTCTTGCTGTTG |
| | | | | GTCCAGCTGAAAAAATAGGCACTTCTCGCATCACTACTGTTGTTCCT |
| | | | | GGGAGTGATGAAT |
| 1787 | Lolium | gDNA | 332 | CTTTACAAGCTCATCGACGTTTATGAGGTTAACTTATTAATGTTGTG |
| | multiflorum | Contig | | GTTTGCATTATTGTTGTTGCCTATGTAAGGTTAGCTCAAATTCGCCTT |
| | | | | GGTTTTTCAGGTCCAAGATCTTACACATTTACCGTTTACTGCTAGAG |
| | | | | AGTTAATGATCATCAAGGTCGCTGGGAACACCTCAGCTCGCAGGGC |
| | | | | TATCCTGGATATTGCTGAGGATGTTTTCGGGGCCAAAACGGTTGAT |
| | | | | GTATCTGACCACACAATAACTCTTCAGGTATTAATTACTTTTAACCTT |
| | | | | TTGTGCAGAACTATTGGATTTAGGACATCTATATGCTTTTCTTGGTA |
| | | | | GGA |
| 1788 | Lolium | gDNA | 285 | GGTCATGCTTGTAGCTAATGTGTTCAGAGCGAAAGTTGTTGATATTT |
| | multiflorum | Contig | | CCGAGAATTCTCTAACCCTAGAGGTAAAAACTTGGCTTCAAACAGT |
| | | | | ATTATAAGGACTAGGGTGTTCCGTGTCTATGCTGGATTAAATTTCTT |
| | | | | GATGCTGATCTGGCTAATGCTGCAGGTCACTGGAGATCCTGGAAAG |
| | | | | ATTGTTGCGGCACAAAGGAGCCTAAGCAAATTTGGGATCGAAGAA |
| | | | | ATTTGTAGAACGGGAAAAGTATTTTTCTGGACCATTTGCTACGTACA |
| | | | | TGCATGG |

We claim:

1. A method of plant control comprising: treating a plant with a composition comprising a polynucleotide and a transfer agent, wherein said polynucleotide is essentially identical or essentially complementary to an ALS gene sequence or fragment thereof, or to an RNA transcript of said ALS gene sequence or fragment thereof, wherein said ALS gene sequence is selected from the group consisting of SEQ ID NO:1-45 and 1692-1788 or a polynucleotide fragment thereof, whereby said plant growth or development or reproductive ability is reduced or said plant is more sensitive to an ALS inhibitor herbicide relative to a plant not treated with said composition.

2. The method as claimed in claim 1, wherein said transfer agent is an organosilicone surfactant composition or compound contained therein.

3. The method as claimed in claim 1, wherein said polynucleotide fragment is 18 contiguous, 19 contiguous nucleotides, 20 contiguous nucleotides or at least 21 contiguous nucleotides in length and at least 85 percent identical to an ALS gene sequence selected from the group consisting of SEQ ID NO:1-45 and 1692-1788.

4. The method as claimed in claim 3, wherein said polynucleotide fragment is selected from the group consisting of sense or anti-sense ssDNA or ssRNA, dsRNA, or dsDNA, or dsDNA/RNA hybrids.

5. The method as claimed in claim 1, wherein said plant is selected from the group consisting of Amaranthus palmeri, Amaranthus rudis, Amaranthus chlorostachys, Amaranthus graecizans, Amaranthus hybridus, Amaranthus lividus, Amaranthus spinosus, Amaranthus thunbergii, Amaranthus viridis, Ambrosia trifida, Kochia scoparia, Abutilon theophrasti, Chenopodium album, Commelina diffusa, Conyza candensis Digitaria sanguinalis Euphorbia heterophylla, and Lolium multiflorum.

6. The method as claimed in claim 1, wherein said composition further comprises said ALS inhibitor herbicide and external application to a plant with said composition.

7. The method as claimed in claim 6, wherein said composition further comprises one or more herbicides different from said ALS inhibitor herbicide.

8. The method as claimed in claim 3, wherein said composition comprises any combination of two or more of said polynucleotide fragments and external application to a plant with said composition.

9. A composition comprising a polynucleotide and a transfer agent, wherein said polynucleotide is essentially identical or essentially complementary to an ALS gene sequence or fragment thereof, or to an RNA transcript of said ALS gene sequence or fragment thereof, wherein said ALS gene sequence is selected from the group consisting of SEQ ID NO:1-45 and 1692-1788 or a polynucleotide fragment thereof, and whereby a plant treated with said composition has its growth or development or reproductive ability regulated, suppressed or delayed or said plant is more sensitive to an ALS inhibitor herbicide as a result of said polynucleotide containing composition relative to a plant not treated with said composition.

10. The composition of claim 9, wherein said transfer agent is an organosilicone composition.

11. The composition of claim 9, wherein said polynucleotide fragment is 18 contiguous, 19 contiguous nucleotides, 20 contiguous nucleotides or at least 21 contiguous nucleotides in length and at least 85 percent identical to an ALS gene sequence selected from the group consisting of SEQ ID NO:1-45 and 1692-1788.

12. The composition of claim 9, wherein said polynucleotide is selected from the group consisting of SEQ ID NO: 46-1363 and 1789-4166.

13. The composition of claim 9, wherein said polynucleotide is selected from the group consisting of SEQ ID NO: 1364-1691 and 4167-4201.

14. The composition of claim 9, further comprising an ALS inhibitor herbicide.

15. The composition of claim 14, wherein said ALS inhibitor molecule is selected from the group consisting of amidosulfuron, azimsulfuron, bensulfuron-methyl, chlorimuron-ethyl, chlorsulfuron, cinosulfuron, cyclosulfamuron, ethametsulfuron-methyl, ethoxysulfuron, flazasulfuron, flupyrsulfuron-methyl-Na, foramsulfuron, halosulfuron-methyl, imazosulfuron, iodosulfuron, metsulfuron-methyl, nicosulfuron, oxasulfuron, primisulfuron-methyl, prosulfuron, pyrazosulfuron-ethyl, rimsulfuron, sulfometuron-methyl, sulfosulfuron, thifensulfuron-methyl, triasulfuron, tribenuron-methyl, trifloxysulfuron, triflusulfuron-methyl, tritosulfuron, imazapic, imazamethabenz-methyl, imazamox, imazapyr, imazaquin, imazethapyr, cloransulam-methyl, diclosulam, florasulam, flumetsulam, metosulam, bispyribac-Na, pyribenzoxim, pyriftalid, pyrithiobac-Na, pyriminobac-methyl, flucarbazone-Na, and procarbazone-Na.

16. The composition of claim 14, further comprising a co-herbicide.

17. A method of reducing expression of an ALS gene in a plant comprising: external application to a plant of a composition comprising a polynucleotide and a transfer agent, wherein said polynucleotide is essentially identical or essentially complementary to an ALS gene sequence or fragment thereof, or to the RNA transcript of said ALS gene sequence or fragment thereof, wherein said ALS gene sequence is selected from the group consisting of SEQ ID NO:1-45 and 1692-1788 or a polynucleotide fragment thereof, whereby said expression of said ALS gene is reduced relative to a plant in which the composition was not applied.

18. The method as claimed in claim 17, wherein said transfer agent is an organosilicone compound.

19. The method as claimed in claim 17, wherein said polynucleotide fragment is 19 contiguous nucleotides, 20 contiguous nucleotides or at least 21 contiguous nucleotides in length and at least 85 percent identical to an ALS gene sequence selected from the group consisting of SEQ ID NO:1-45 and 1692-1788.

20. The method as claimed in 17, wherein said polynucleotide molecule is selected from the group consisting of sense or anti-sense ssDNA or ssRNA, dsRNA, or dsDNA, or dsDNA/RNA hybrids.

21. A microbial expression cassette comprising a polynucleotide fragment of 18 contiguous, 19 contiguous nucleotides, 20 contiguous nucleotides or at least 21 contiguous nucleotides in length and at least 85 percent identical to an ALS gene sequence selected from the group consisting of SEQ ID NO:1-45 and 1692-1788.

22. A method of making a polynucleotide comprising a) transforming the microbial expression cassette of claim 21 into a microbe; b) growing said microbe; c) harvesting a polynucleotide from said microbe, wherein said polynucleotide is 18 contiguous, 19 contiguous nucleotides, 20 contiguous nucleotides or at least 21 contiguous nucleotides in length and at least 85 percent identical to an ALS gene sequence selected from the group consisting of SEQ ID NO:1-45 and 1692-1788.

23. A method of identifying polynucleotides useful in modulating ALS gene expression when externally treating a plant comprising: a) providing a plurality of polynucleotides that comprise a region essentially identical or essentially complementary to a polynucleotide fragment of 18 contiguous, 19 contiguous nucleotides, 20 contiguous nucleotides or at least 21 contiguous nucleotides in length and at least 85 percent identical to an ALS gene sequence selected from the group consisting of SEQ ID NO:1-45 and 1692-1788; b) externally treating said plant with one or more of said polynucleotides and a transfer agent; c) analyzing said plant or extract for modulation of ALS gene expression, and whereby a plant treated with said composition has its growth or development or reproductive ability regulated, suppressed or delayed or said plant is more sensitive to an EPSPS inhibitor herbicide as a result of said polynucleotide containing composition relative to a plant not treated with said composition.

24. The method as claimed in 23, wherein said plant is selected from the group consisting of Amaranthus palmeri, Amaranthus rudis, Amaranthus chlorostachys, Amaranthus graecizans, Amaranthus hybridus, Amaranthus lividus, Amaranthus spinosus, Amaranthus thunbergii, Amaranthus viridis, Ambrosia trifida, Kochia scoparia, Abutilon theophrasti, Chenopodium album, Commelina diffusa, Conyza candensis Digitaria sanguinalis Euphorbia heterophylla, and Lolium multiflorum.

25. The method as claimed in 23, wherein said ALS gene expression is reduced relative to a plant not treated with said polynucleotide fragment and a transfer agent.

26. The method as claimed in 23, wherein said transfer agent is an organosilicone compound.

27. An agricultural chemical composition comprising an admixture of a polynucleotide and a glyphosate herbicide and a co-herbicide, wherein said polynucleotide is essentially identical or essentially complementary to a portion of an ALS gene sequence, or to a portion of an RNA transcript of said ALS gene sequence, wherein said ALS gene sequence is selected from the group consisting of SEQ ID NO: 1-45 and 1692-1788 or a polynucleotide fragment thereof, and whereby a plant treated with said composition has its growth or development or reproductive ability regulated, suppressed or delayed or said plant is more sensitive to an ALS inhibitor herbicide as a result of said polynucleotide containing composition relative to a plant not treated with said composition.

28. The agricultural chemical composition of claim 27, wherein said co-herbicide is selected from the group consisting of amide herbicides, arsenical herbicides, benzothiazole herbicides, benzoylcyclohexanedione herbicides, benzofuranyl alkylsulfonate herbicides, carbamate herbicides, cyclohexene oxime herbicides, cyclopropylisoxazole herbicides, dicarboximide herbicides, dinitroaniline herbicides, dinitrophenol herbicides, diphenyl ether herbicides, dithiocarbamate herbicides, halogenated aliphatic herbicides, imidazolinone herbicides, inorganic herbicides, nitrile herbicides, organophosphorus herbicides, oxadiazolone herbicides, oxazole herbicides, phenoxy herbicides, phenylenediamine herbicides, pyrazole herbicides, pyridazine herbicides, pyridazinone herbicides, pyridine herbicides, pyrimidinediamine herbicides, pyrimidinyloxybenzylamine herbicides, quaternary ammonium herbicides, thiocarbamate herbicides, thiocarbonate herbicides, thiourea herbicides, triazine herbicides, triazinone herbicides, triazole herbicides, triazolone herbicides, triazolopyrimidine herbicides, uracil herbicides, and urea herbicides.

29. An agricultural chemical composition comprising an admixture of a polynucleotide and a glyphosate herbicide and a pesticide, wherein said polynucleotide is essentially identical or essentially complementary to a portion of an ALS gene sequence or a fragment thereof, or to a portion of an RNA transcript of said ALS gene sequence or a fragment thereof, wherein said ALS gene sequence is selected from the group consisting of SEQ ID NO:1-45 and 1692-1788 or a polynucleotide fragment thereof, and whereby a plant treated with said composition has its growth or development or reproductive ability regulated, suppressed or delayed or said plant is more sensitive to an ALS inhibitor herbicide as a result of said polynucleotide containing composition relative to a plant not treated with said composition.

30. The agricultural chemical composition of claim 29, wherein said pesticide is selected from the group consisting of insecticides, fungicides, nematocides, bactericides, acaricides, growth regulators, chemosterilants, semiochemicals, repellents, attractants, pheromones, feeding stimulants, and biopesticides.

31. A polynucleotide molecule applied to the surface of a plant that enhances said plant sensitivity to a glyphosate containing herbicide composition, wherein said polynucleotide comprises a homologous or complementary polynucleotide having at least 85 percent identity to a polynucleotide selected from the group consisting of SEQ ID NO:4202 and 4218-4247.

The application's sequence listing, which the Patent Office published only in electronic form, follows.

SEQUENCE LISTING (4247 sequences)

SEQ ID NO: 1 - DNA, 534 bp, Amaranthus chlorostachys
ataattatttggtgttagatgttgaggatatcctagaattgttaaggaagctttctgttagctaattctggtagacctggacctgttttgattgatatcctaaagatattcagcaacaattagttgttccaattgggaacagcccaattaaattgggtgggtatctttctaggttgcctaaactcacttcaactgctaattaagagggacttcttgatcaaattgtgaggttggtgggtgaagaaaccattgatgaagatgggcgaagaattcaaatcaatgttgtggttttgaaggttttgttgtgaaggttttttttaagtgccattaatgaagaggtttaaggaagaaaccataatggggaggttgaggaagaaggtgatgaagatgataacctgctgtttcaggttactaaaaccgactacacctttaaaagcgaagacccccaaagttcgagcctttaaaagataaacgcaagtttaaacctctaaaagcaaatgagctaaagttcgtaccttttaaatcaaattttcc

SEQ ID NO: 2 - DNA, 500 bp, Amaranthus chlorostachys
cgggcacatacatacctcgggaatccttccaattcttccgaaatcttcccggatatgctcaaatttgctgaagcatgtgatataccagcagcccgtgttaccaaggtgagcgatttaaggactgcaattcaaacaatgttggatactccaggaccgtatctgctggatgtaatcgtaccacatcaggagcatgtgctgcctatgatccctagcggtgccgccttcaaggacaccataacagagggtgatggaagaagggcttattagttggttggagatctttatagaggagaagcttttttgtatgtatgttagtagttccataaacttctatattctctggccgttctctcgtttagctgtttttatgttagtttgttgttttcatgttgcttgctactttgaaaaacccttttgtgttttagacccattagcatgaataatcttcctatattattgtatggttcgatacacgctagttgtttctttgtattatcgag

SEQ ID NO: 3 - DNA, 2267 bp, Amaranthus graecizans
ttccttctcagtgattccctttctccattttcgcttagctctcctctcacactaattacctccatttccaaccttccaagctttcaacaatggcgtccacttcttcaaacccaccattttcctcttttactaaacctaacaaaatccctaatcttcaatcctccatttacgctctccctttttccaattctcttaaacccacttcttcttcttcaatcctccgccgccctcttcaaatctcatcatcttcttctcaatcacctaaacctaaacctccttccgctactataattcaatcaccatctctcaccgatgataaaccctcttcttttttttcccgatttagccctgaagaacccagaaaaggttgcgatgttcttgttgaagctcttgaacgtgaaggtgttaccgatgtttttgcttaccctggtggagcttccatggaaatccatcaagctcttactcgttctaatatcattagaaatgttcttcctcgacatgaacaaggtgggttttcgctgctgaaggctacgctcgtgctactggacgtgttggagtttgtattgctacttctggtccaggtgctactaatcttgtctctggtcttgctgatgcccttcttgactcagtcccgcttgtcgccattactgggcaagttcctcggcgtatgatcggtactgatgcttttcaagagactcctattgttgaggtaactcgatcgattactaagcataattatctggtgttagatgttgaggatatccctagaattgttaaggaagctttctttttagctaattctggtagacctggacctgttttgattgatattcctaaagatattcagcaacaattggttgttcctaattgggaacagcctattaaattaggtgggtatctttctaggttgcctaaacccacttattctgctaatgaagaggggcttcttgatcaaattgtgaggttagtgggtgaggctaagagacctgtgctgtatactggaggtgggtgtttgaattctagtgaagaattaaggaaatttgtcgagttgacagggattccggttgctagtactttaatggggttgggggctttcccttgtactgatgatttgtcccttcatatgttgggaatgcacgggactgtgtacgcgaattacgcggttgataaggctgatttattgcttgctttcggggttaggtttgatgatcgagtgactgggaagcttgaggcgtttgctagccgggctaagattgtgcacatcgatatcgattctgctgaaatcgggaagaataagcaacctcatgtgtcgatttgtggtgatgttaaagtggcattacaggggttgaataagattttggaatctagaaaaggaaaggtgaaattggatttctctaattggagggaggaattgaatgagcagaaaaagaagtttcctttgagttttaagactttcggggacgcaattcctccgcaatatgccattcaggtgcttgacgagttgacaaagggtgatgcggttgtaagtaccggtgttgggcagcaccaaatgtgggctgcccaattctataagtaccgaaatcctcgccaatggctgacctcgggtggtttgggggctatggggtttggtctaccagccgctattggagctgctgttgctcgaccagatgcggtggttgtagacattgatggggatgggagttttatcatgaatgttcaagaattggctacgattagggtggagaatctcccggttaaaatcatgctcttgaacaatcaacatttaggtatggttgttcaatgggaagatcgattttacaaagctaaccgggcacatacatacctcgggaatccttctaattcttccgaaatcttcccggatatgctcaaatttgctgaagcatgtgatataccagcagcccgtgttaccaaggtgagcgatttaagggctgcaattcaaacaatgttggatactccaggaccatatctgctggatgtaatcgtaccacatcaggagcatgtgctgcctatgatccctagcggcgccgccttcaaggacaccatcacagagggtgatggaagaagggcttattagttggttggagatctttatagaggagaagcttttttgtatgtatgttagtagttccataaacttctatattctctggccgttctctcgtttagctgtttttatgttagtttgttgttttcatgttgcttgttactttgaaaaacccttttgtgtttaagacccattagcatag

SEQ ID NO: 4 - DNA, 2250 bp, Amaranthus hybridus
ttaccttcatttccaacctttcaagctttcaacaatggcgtccacttcttcaaacccaccattttcctcttttactaaacctaacaaaatccctaatctgcaatcatccatttacgctatccctttttccaattctcttaaacccacttcttcttcttcaatcctccgccgccctcttcaaatctcatcatcttcttctcaatcacctaaacctaaacctccttccgctactataactcaatcaccttcgtctctcaccgatgataaaccctcttcttttgtttcccgatttagccctgaagaacccagaaaaggttgcgatgttctcgttgaagctcttgaacgtgaaggtgttaccgatgtttttgcttaccctggtggagcatccatggaaattcatcaagctcttactcgttctaatatcattagaaatgttcttcctcgacatgaacaaggtggggttttcgctgctgaaggctacgctcgtgctactggacgcgttggagtttgtattgccacttctggtccaggtgctactaatcttgtttctggtcttgctgatgcacttcttgactcagtccctcttgtcgccattactgggcaagttccccggcgtatgattggtactgatgcttttcaagagactccaattgttgaggtaactcgatccattaccaagcataattatttggtgttagatgttgaggatattcctagaattgttaaggaagctttctttttagctaattctggtagacctggacctgttttgattgatattcctaaagatattcagcaacaattagttgttcctaattgggaacagcccattaaattgggtgggtatctttctaggttgcctaaacccacttattctgctaatgaagagggacttcttgatcaaattgtaaggttagtgggtgagtctaagagacctgtgctgtatactggaggtgggtgtttgaattctagtgaagaattgaggaaatttgtcgaattgacaggtattccggtggctagtactttaatggggttgggggctttcccttgtactgatgatttatctcttcatatgttgggaatgcacgggactgtgtacgcgaattacgcggttgataaggccgatttgttgcttgcttttggggttaggtttgatgatcgagtgactggtaagctcgaggcgtttgctagccgggctaagattgtgcacatcgatatcgattctgctgaaatcgggaagaataagcaacctcatgtgtcgatttgtggtgatgttaaagtggcattacaggggttgaataagattttggaatctagaaaaggaaaggtgaaattggatttctctaattggagggaggagttgaatgagcagaaaaagaagtttcctttgagttttaagactttcggggatgcaattcctccgcaatacgccattcaggttcttgacgagttgacgaagggcgatgcggttgtaagtactggtgttgggcagcaccaaatgtgggctgcccaattctataagtaccgaaatcctcgccaatggctgacctcgggtggtttgggggctatggggtttggtctaccagctgctattggagctgctgttgctcgaccagatgcggtggttgtagacattgatggggatgggagttttatcatgaatgttcaagagttggctacgattagggtagagaatctcccggttaaaatcatgctcttgaacaatcaacatttaggtatggttgttcaatgggaagatcgattttacaaagctaaccgggcacatacatacctcgggaatccttccaattcttccgaaatcttcccggatatgctcaaatttgctgaagcatgtgatataccagcagcccgtgttaccaaggtgagcgatttaagggctgcaattcaaacaatgttggatactccaggaccgtatctgctggatgtaatcgtaccacatcaggagcatgtgctgcctatgatccctagcggtgccgccttcaaggacaccataacagagggtgatggaagaagggcttattagttggttggagatctttatagaggagaagcttttttgtatgtatgttagtagttccataaacttctatattctctggccgttctctcgtttagctgtttttatgttagtttgttgttttcatgttgcttgctactttgaaaaacccttttgtgttttagacccattagcatgaataatcttcctatattattgtatggttcgataca

SEQ ID NO: 5 - DNA, 2133 bp, Amaranthus lividus
cgcctccactctgggtgattccctttctccattctcgcttagctttcctctcacacaaattacctttatttccaacctttcaagctttcaacaatggcgtccacttcttcaaacccaccattttcctcttttactaaacctaacaaaatccctaatctgcaatcatccatttacgctatccctttttccaattctcttaaacccacttcttcttcttcaatcctccgccgccctcttcaaatctcatcatcttcttctcaatcacctaaacctaaacctccttccgctactataactcaatcaccttcgtctctcaccgatgataaaccctcttcttttgtttcccgatttagccctgaagaacccagaaaaggtagcgatgttctcgttgaagctcttgaacgtgaaggtgttaccgatgtttttgcttaccctggtggagcatccatggaaattcatcaagctcttactcgttctaatatcattagaaatgttcttcctcgacatgaacaaggtggggttttcgctgctgaaggctacgctcgtgctactggacgcgttggagtttgtattgccacttctggtccaggtgctactaatcttgtttctggtcttgctgatgcacttcttgactcagtccctcttgtcgccattactgggcaagttccccggcgtatgattggtactgatgcttttcaagagactccaattgttgaggtaactcgatccattaccaagcataattatttggtgttagatgttgaggatattcctagaattgttaaggaagctttctttttagctaattctggtagacctggacctgttttgattgatattcctaaagatattcagcaacaattagttgttcctaattgggaacagcccattaaattgggtgggtatctttctaggttgcctaaacccacttattctgctaatgaagagggacttcttgatcaaattgtaaggttagtgggtgagtctaagagacctgtgctgtatactggaggtgggtgtttgaattctagtgaagaattgaggaaatttgtcgaattgacaggtattccggtggctagtactttaatggggttgggggctttcccttgtactgatgatttatctcttcatatgttgggaatgcacgggactgtgtacgcgaattacgcggttgataaggccgatttgttgcttgcttttggggttaggtttgatgatcgagtgactggtaagctcgaggcgtttgctagccgggctaagattgtgcacatcgatatcgattctgctgaaatcgggaagaataagcaacctcatgtgtcgatttgtggtgatgttaaagtggcattacaggggttgaataagattttggaatctagaaaaggaaaggtgaaattggatttctctaattggagggaggagttgaatgagcagaaaaagaagtttcctttgagttttaagactttcggggatgctattcctccgcaatacgccattcaggttcttgacgagttgacgaagggcgatgcggttgtaagtactggtgttgggcagcaccaaatgtgggctgcccaattctataagtaccgaaatcctcgccaatggctgacctcgggtggtttgggggctatggggtttggtctaccagctgctattggagctgctgttgctcgaccagatgcggtggttgtagacattgatggggatgggagttttatcatgaatgttcaagagttggctacgattagggtagagaatctcccggttaaaatcatgctcttgaacaatcaacatttaggtatggttgttcaatgggaagatcgattttacaaagctaaccgggcacatacatacctcgggaatccttccaattcttccgaaatcttcccggatatgctcaaatttgctgaagcatgtgatataccagcagcccgtgttaccaaggtgagcgatttaagggctgcaattcaaacaatgttggatactccaggaccgtatctgctggatgtaatcgtaccacatcaggagcatgtgctgcctatgatccctagcggtgccgccttcaaggacaccataacagagggtgatggaagaagggcttattagttggttggagatctttatagaggagaagct

SEQ ID NO: 6 - DNA, 2348 bp, Amaranthus palmeri
tccctttctccattttcgcttagctttcctctcacacaaattacctccatttccaaccctccaagctttcaacaatggcgtccacttcaacaaacccaccattttcctcttttactaaacctaacaaaatccctaatctgcaatcatccatttacgctatccctttttccaattctcttaaacccacttcttcttcttcaatcctccgccgccctcttcaaatctcatcatcttcttctcaatcacctaaacctaaacctccttccgctactataactcaatcaccttcatctctcaccgatgataaaccctcttcttttgtttcccgatttagccctgaagaacccagaaaaggttgcgatgttctcgttgaagctcttgaacgtgaaggtgttaccgatgtttttgcttaccctggtggagcatccatggaaatccatcaagctcttactcgttctaatatcattagaaatgttcttcctcgacatgaacaaggtggggttttcgctgctgaaggctacgctcgtgctactggacgcgttggagtttgtattgccacttctggtccaggtgctactaatcttgtttctggtcttgctgatgcacttcttgactcagtcccgcttgtcgccattactgggcaagttccccggcgtatgattggtactgatgctttccaagagactccaattgttgaggtaactcgatccattactaagcataattatttggtgttagatgttgaggatattcctagaattgttaaggaagctttctttttagctaattctggtagacctggacctgttttgattgatattcctaaagatattcagcaacaattagttgttcctaattgggaacagcccattaaattgggtgggtatctttctaggttgcctaaacccacttattctgctaatgaagagggacttcttgatcaaattgtaaggttagtgggtgagtctaagagacctgtgctgtatactggaggtgggtgtttgaattctagtgaagaattgaggaaatttgtcgaattgacagggattccggtggctagtactttaatggggttgggggctttcccttgtactgatgatttatcacttcatatgttgggaatgcacgggactgtgtatgcgaattacgcggttgataaggccgatttgttgcttgctttcggggttaggtttgatgatcgagtgactggtaagctcgaggcgtttgctagccgggctaagattgtgcacatcgatatcgattctgctgaaatcgggaagaataagcaacctcatgtgtcgatttgtggtgatgttaaagtggcattacaggggttgaataagattttggaatctagaaaaggaaaggtgaaattggatttctctaattggagggaggagttgaatgagcagaaaaagaagtttcctttgagttttaagactttcggggatgcaattcctccgcaatacgccattcaggttcttgacgagttgacgaagggtgatgcggttgtaagtaccggtgttgggcagcaccaaatgtgggctgcccaattctataagtaccgaaatcctcgccaatggctgacctcgggtggtttgggggctatggggtttggtctaccagctgcaattggagctgctgttgctcgaccagatgcggtggttgtagacattgatggggatgggagttttatcatgaatgttcaagagttggctacgattagggtggagaatctcccggttaaaatcatgctcttgaacaatcaacatttaggtatggttgttcaatgggaagatcgattttacaaagctaaccgggcacatacatacctcgggaatccttccaattcttccgaaatcttcccggatatgctcaaattcgctgaagcatgtgatataccagcagctcgtgttaccaaggtgagcgatttaagggctgcaattcaaacaatgttggatactccaggaccgtatctgctggatgtaatcgtaccacatcaggagcatgtgctgcctatgatccctagcggtgccgccttcaaggacaccatcacagagggtgatggaagaagggcttattagttggttggagatctttatagaggagaagcttttttgtatgtatgttagtatttccataaacttctatattctctggccggcctctcgtttagctgtttttatgttagtttgttgttttcatgttgcttgctactttgaaaaacccttgtgttttagacccattagcatgaataatcatcctatattattgtatggtttgatacacgctagttgtttctttttatcatcgagataaagacaactactaatcggtgtaaccactgt

SEQ ID NO: 7 - DNA, 6061 bp, Amaranthus palmeri
tgatcatgaaattagtttgaggaatcgttttttcgagtactgaagactagaaaggaacttgagacatcagtttgggaattcgatggagtagcggatcgttcttcactttttgctcgggaggtatcaatggcgtaaattttttttggagactgactcaaatgggattctttgtgtagtgtacagcttcacttaccacaggaacacaggtgttttttgctatataggtacagaaactcggaaaagtccacatttactctataacttcatttacggtctaaaagtagttgagaaggtaaaatttaggatgcaattttttgaaagctttctatgatagcaaattcttactttttatttctactggtaattgtcattttgtcaatgtcctttgcaaagactaattttacagacttgttattttcgtttaaaatgtttcgtatgataccgaaccagaaagagaaacaagaaattcgggcgaatttttctcgtcatatgttagatcgaaaccatatgatcagcttgatcttggttgtactggtgtattgattttcatggtaaatgtcaatattttcatggtaaacaacttgggtgccaattttgttagggttagatttggtgctgcttttgaatcagagatgaaatcagccgagaaatgaagataaattggggtgattttgcaaaatagtttgtctgttaattttaacttatatttgttacattctttgttacttgcaccattgttgactttggtactattcatcaagcaaatcgactttcatattgtcggtaatctataaaataaaatatagttttctgagatcttgttgaatcgtctcgattcaacggttattaatttttagttttcataattttttgatatgtataataaaagatattaacaattgatatcctgtatttggggtacgaaaaagcaaatagtgcaagtaaaaaagaacggaggaagtacatgtacaattatcactcaactattagataaattagttggttgagataaatcgttagaacttagaaatcaccaaatctataataagcttttcgcattagcgtgtttgatatcagctgcttagttgatgaaattagatggttaaatcactcgcttgaagctatcacttatcaaccgtttgtcaaagatccttgcattttaattcattgtgacttgtgagatagatctatatgaagaatttaaattttaacaataagcgttttaatatttaaagctggtgttttgataaatttaattaaactatttagataagttcggactgtctcttcatgagagatgagactgtatcaatcagctaatttataatcacctaaatatctccttatcatcataatacatccacctcataaaatctataaccagaatctaaaagagggatggaagacgacaagtcaacccctcacctaatcatgtctttgatgttaatagcataaaagcacatgagtgatgagaacaaacacatcaaccctaatcttatccaagaaaataccccattaggcattaaggtccttttcttttgttttcttttgccctaaaaagcaaaagtggaaagaaacccaaaaaaatcaatttcacgttgcaaattgtcaaatttttttataaaaaaaaatgaaaaatctttataccacaaaaacaaaaagcaacaatgaaaatttagaatcatactcccgtttcaatttacttgcaacagttacgcagtttaatacactaattcaatccttaatatctataattataaataataaaaaattataaaaatttaatattaataatctttgcaatgagatgaatcaaacaagatttcactaataaataatgtcatttttttatatgttgcaactgatatggaacagagaaagtatcaatcttgatattcaagggtatttaagtaattacagaacaaccattgttatttgttaagcgcctccactcatttcttcttccttctcagttattccatttctccattttcgcttagctttcctctcacacaaattacctccatttccaacctttcaagctttcaacaatggcgtccacttcaacaaacccaccattttcctcttttactaaacctaacaaaatccctaatctgcaatcatccatttacgctatccctttttccaattctcttaaacccacttcttcttcttcaatcctccgccgccctcttcaaatctcatcatcttcttctcaatcacctaaacctaaacctccttccgctactataactcaatcaccttcatctctcaccgatgataaaccctcttcttttgtttcccgatttagccctgaagaacccagaaaaggttgcgatgttctcgttgaagctcttgaacgtgaaggtgttaccgatgtttttgcttaccctggtggagcatccatggaaatccatcaagctcttactcgttctaatatcattagaaatgttcttcctcgacatgaacaaggtggggttttcgctgctgaaggctacgctcgtgctactggacgcgttggagtttgtattgccacttctggtccaggtgctactaatcttgtttctggtcttgctgatgcacttcttgactcagtcccgcttgtcgccattactgggcaagttccccggcgtatgattggtactgatgctttccaagagactccaattgttgaggtaactcgatccattactaagcataattatttggtgttagatgttgaggatattcctagaattgttaaggaagctttctttttagctaattctggtagacctggacctgttttgattgatattcctaaagatattcagcaacaattagttgttcctaattgggaacagtccattaaattgggtgggtatctttctaggttgcctaaacccacttattctgctaatgaagagggacttcttgatcaaattgtaaggttagtgggtgagtctaagagacctgtgctgtatactggaggtgggtgtttgaattctagtgaagaattgaggaaatttgtcgaattgacagggattccggtggctagtactttaatgggtttgggggctttcccttgtactgatgatttatcacttcatatgttgggaatgcacgggactgtgtatgcgaattacgcggttgataaggccgatttgttgcttgctttcggggttaggtttgatgatcgagtgactggtaagctcgaggcgtttgctagccgggctaagattgtgcacatcgatatcgattctgctgaaatcgggaagaataagcaacctcatgtgtcgatttgtggtgatgttaaagtggcattacaggggttgaataagattttggaatctagaaaaggaaaggtgaaattggatttctctaattggagggaggagttgaatgagcagaaaaagaagtttcctttgagttttaagactttcggggatgcaattcctccgcaatacgccattcaggttcttgacgagttgacaaagggtgatgcggttgtaagtaccggtgttgggcagcaccaaatgtgggctgcccaattctataagtaccgaaatcctcgtcaatggctgacctcgggtggtttgggggctatggggtttggtctaccagctgctattggagctgctgttgctcgaccagatgcggtggttgtagacattgatggggatgggagttttatcatgaatgttcaagagttggctacgattagggtggagaatctcccggttaaaatcatgctcttgaacaatcaacatttaggtatggttgttcaatgggaagatcgattttacaaagctaaccgggcacatacatacctcgggaatccttccaattcttccgaaatcttcccggatatgctcaaatttgctgaagcatgtgatataccagcagcccgtgttaccaaggtgagcgatttaagggctgcaattcaaacaatgttggatactccaggaccgtatctgctggatgtaatcgtaccacatcaggagcatgtgctgcctatgatccctagcggcgccgccttcaaggacaccatcactgagggtgatggaagaagggcttattagttggttggagatctttatagaggagaagcttttttgtatgtatgttagtatttccataaacttctatattctctggccggcctctcgtttagctgtttttatgttagtttgttgttttcatgttgcttgctactttgaaaaacccttttgtgttttagacccattagcatgaataatcatcctatattattgtatggtttgatacacgctagttgtttctttttatcatcgagataaagacaactactaatcggtgtaaccatgtttgtctcacattgctcgacgttttgttctcctttgatgaatttgatattaggaagtttgtttgatactagtgaatcctcatgtcctatcctgttttctcgtcttagcgaacattggtattgtatctcttggtgggtataggagtattcgattcgttgttatgttcgactccttcagtgcttttggtgggtttttcaaagaaggaaaaggaagcagaaatggccttagaatgtaaagtggtctttttctgtaagtgggtattgcctttcatcagccatgtttttatctttatattttgtggtctttgaggctttatgtttagtgtttggtgtcttttcgtcgtattctgtgatcagttctgaaatgtggatcgtaaagacatagatgatgaggaagagggtcgggatgagagcagcgttttactcgaaaagcgatcctagtaaggaccgaaccgagtcaacatttcgagatgatatgtgttcgagtttgacatgaaaatctatctgcctgctcagtgctcacaatggtaaattgtactgtaaatgattgttatgtcatgttggtttttcatctggaaatgtgtatctgtaatggttcttgtcagttgattgtatcggtgttcattcgggttgattttgggttaggttttcaagactgtttgaaatcaatttatgtcattgtgtctatattgtttgttacataactgcaaatcatttttgaagtcgtatcaaatcggattcaattataaggttgggtgaattttgagtcattgggtctgaattaaacacctatcccaaggattatacatttgttgcaattttgctcttttcattcttaaatttggcttcatcacggtgttttgttttataagattctattcgaatctaaagccgaacacacttgatcattaacatatgactaatttaacataattggccggctaattagccatataaattcaaggttgcttaaaattgttgaagaatagccctaaagacgtataatcacttttaatattttttaattttttaacgtgatttgatttgatatcttttaatatactattaggctcattgtatgctacaaatttgaggggaaaactatgaacaacaattcatattaatatgttttttaacaaacaagaaaaatagaaagttaaaagacaatgattcatcaaataaatcatgtgtactttttattcgtttgtagttgcatatgacgttacaaccatcgaaaacaatcattttattagttttatcattgattgtttttgatggttgtaacgtcatatgcaaccataaacgtataaaaagtgactcaatttctagaggctaaaacaattgggttgcctaacaagtgttgatttaatattaggttgtttgtgcttacttaataaatctctacactagtcttaaaattgtaatctaaattgtgctacaaaaataggtaattaattagaaaagtcgattaaatcaatcttttagggtatattagcaattattactaatgattataagtaaccgagaggtcttgtcatttaggattaattgatattaggtcttttgagagccgtctttacaaaatacggtctcaagtaagaatttatgaattttttttattcttacatgactcatggaaagattcctagttgttccaaagcccaatcatctattcacaatttatttaaattcgacccaaactaatttattcaactcaacctaaaatgattcttgttc

SEQ ID NO: 8 - DNA, 5410 bp, Amaranthus palmeri
tgatcatgaaattagtttgaggaatcgttttttcgagtactgaagactagaaaggaacttgagacatcagtttgggaattcgatggagtagcggatcgttcttcactttttgctcgggaggtatcaatggcgtaaattttttttggagactgactcaaatgggattctttgtgtagtgtacagcttcacttaccacaggaacacaggtgttttttgctatataggtacagaaactcggaaaagtccacatttactctataacttcatttacggtctaaaagtagttgagaaggtaaaatttaggatgcaattttttgaaagctttctatgatagcaaattcttactttttatttctactggtaattgtcattttgtcaatgtcctttgcaaagactaattttacagacttgttattttcgtttaaaatgtttcgtatgataccgaaccagaaagagaaacaagaaattcgggcgaatttttctcgtcatatgttagatcgaaaccatatgatcagcttgatcttggttgtactggtgtattgattttcatggtaaatgtcaatattttcatggtaaacaacttgggtgccaattttgttagggttagatttggtgctgcttttgaatcagagatgaaatcagccgagaaatgaagataaattggggtgattttgcaaaatagtttgtctgttaattttaacttatatttgttacattctttgttacttgcaccattgttgactttggtactattcatcaagcaaatcgactttcatattgtcggtaatctataaaataaaatatagttttctgagatcttgttgaatcgtctcgattcaacggttattaatttttagttttcataattttttgatatgtataataaaagatattaacaattgatatcctgtatttggggtacgaaaaagcaaatagtgcaagtaaaaaagaacggaggaagtacatgtacaattatcactcaactattagataaattagttggttgagataaatcgttagaacttagaaatcaccaaatctataataagcttttcgcattagcgtgtttgatatcagctgcttagttgatgaaattagatggttaaatcactcgcttgaagctatcacttatcaaccgtttgtcaaagatccttgcattttaattcattgtgacttgtgagatagatctatatgaagaatttaaattttaacaataagcgttttaatatttaaagctggtgttttgataaatttaattaaactatttagataagttcggactgtctcttcatgagagatgagactgtatcaatcagctaatttataatcacctaaatatctccttatcatcataatacatccacctcataaaatctataaccagaatctaaaagagggatggaagacgacaagtcaacccctcacctaatcatgtctttgatgttaatagcataaaagcacatgagtgatgagaacaaacacatcaaccctaatcttatccaagaaaataccccattaggcattaaggtccttttcttttgttttcttttgccctaaaaagcaaaagtggaaagaaacccaaaaaaatcaatttcacgttgcaaattgtcaaatttttttataaaaaaaaatgaaaaatctttataccacaaaaacaaaaagcaacaatgaaaatttagaatcatactcccgtttcaatttacttgcaacagttacgcagtttaatacactaattcaatccttaatatctataattataaataataaaaaattataaaaatttaatattaataatctttgcaatgagatgaatcaaacaagatttcactaataaataatgtcatttttttatatgttgcaactgatatggaacagagaaagtatcaatcttgatattcaagggtatttaagtaattacagaacaaccattgttatttgttaagcgcctccactcatttcttcttccttctcagttattccatttctccattttcgcttagctttcctctcacacaaattacctccatttccaacctttcaagctttcaacaatggcgtccacttcaacaaacccaccattttcctcttttactaaacctaacaaaatccctaatctgcaatcatccatttacgctatccctttttccaattctcttaaacccacttcttcttcttcaatcctccgccgccctcttcaaatctcatcatcttcttctcaatcacctaaacctaaacctccttccgctactataactcaatcaccttcatctctcaccgatgataaaccctcttcttttgtttcccgatttagccctgaagaacccagaaaaggttgcgatgttctcgttgaagctcttgaacgtgaaggtgttaccgatgtttttgcttaccctggtggagcatccatggaaatccatcaagctcttactcgttctaatatcattagaaatgttcttcctcgacatgaacaaggtggggttttcgctgctgaaggctacgctcgtgctactggacgcgttggagtttgtattgccacttctggtccgggtgctactaatcttgtctctggtcttgctgatgcgcttcttgactcagtcccgctcgtcgccattactgggcaagttccccggcgtatgattggtactgatgcttttcaagagactccaattgttgaggtaactcgatccattactaagcataattatttggtgttagatgttgaggatattcctagaattgttaaggaagctttctttttagctaattctggtagacctggacctgttttgattgatattcctaaagatattcagcaacaattagttgttcctaattgggaacagcccattaaattgggtgggtatctttctaggttgcctaaacccacttattctgctaatgaagagggacttcttgatcaaattgtaaggttagtgggtgagtctaagagacctgtgctgtatactggaggtgggtgtttgaattctagtgaagaattgaggaaatttgtcgaattgacagggattccggtggctagtactttaatgggtttgggggctttcccttgtactgatgatttatcacttcatatgttgggaatgcacgggactgtgtatgcgaattacgcggttgataaggccgatttgttgcttgctttcggggttaggtttgatgatcgagtgactggtaagctcgaggcgtttgctagccgggctaagattgtgcacatcgatatcgattctgctgaaatcgggaagaataagcaacctcatgtgtcgatttgtggtgatgttaaagtggcattacaggggttgaataagattttggaatctagaaaaggaaaggtgaaattggatttctctaattggagggaggagttgaatgagcagaaaaagaagtttcctttgagttttaagactttcggggatgcaattcctccgcaatacgccattcaggttcttgacgagttgacaaagggtgatgcggttgtaagtaccggtgttgggcagcaccaaatgtgggctgcccaattctataagtaccgaaatcctcgccaatggctgacctcgggtggtttgggggctatggggtttggtctaccagctgctattggagctgctgttgctcgaccagatgcggtggttgtagacattgatggggatgggagttttatcatgaatgttcaagagttggctacgattagggtggagaatctcccggttaaaatcatgctcttgaacaatcaacatttaggtatggttgttcaatgggaagatcgattttacaaagctaaccgggcacatacatacctcgggaatccttccaattcttccgaaatcttcccggatatgctcaaattcgctgaagcatgtgatataccagcagctcgtgttaccaaggtgagcgatttaagggctgcaattcaaacaatgttggatactccaggaccgtatctgctggatgtaatcgtaccacatcaggagcatgtgctgcctatgatccctagcggtgccgccttcaaggacaccatcacagagggtgatggaagaagggcttattagttggttggagatctttatagaggagaagcttttttgtatgtatgttagtatttccataaacttctatattctctggccggcctctcgtttagctgtttttatgttagtttgttgttttcatgttagtttgttgttttcatgttgcttgctactttgaaaaacccttttgtgttttagacccattagcatgaataatcatcctatattattgtatggttcgatacacgctagttgtttctttttattatcgagttaaagacaactactaatcggtgtaaccaagtttgtctcacattgctcgacgttttgttctcctttgatgaatttgatattaggaagtttgtttgatactagtgaatcctcatgtcctatcctgttttctcgtcttagcgaacattggtattgtatctcttggtgggtataggagtattcgattcgttgttatgttcgactccttcagtgcttttggtgggtttttcaaagaaggaaaaggaagcagaaatggccttagaatgtaaagtggtctttttctgtaagtgggtattgcctttcatcagccatgtttttatctttatattttgtggtctttgaggctttatgtttagtgtttggtgtcttttcgtcgtattctgtgatcagttctgaaatgtggatcgtaaagacatagatgatgaggaagagggtcgggatgagagcagcgttttactcgaaaagcgatcctagtaaggaccgaaccgagtcaacatttcgagatgatatgtgttcgagtttgacatgaaaatctatctgcctgctcagtgctcacaatggtaaattgtactgtaaatgattgttatgtcatgttggtttttcatctggaaatgtgtatctgtaatggttcttgtcagttgattgtatcggtgttcattcgggttgattttgggttaggttttcaagactgtttgaaatcaatttatgtcattgtgtctatattgtttgttacataactgcaaatcatttttgaagtcgtatcaaatcggattcaattataaggttgggtgaattttgagtcattgggtctgaattaaacacctatcccaaggattatacatttgttgcaattttgctcttttcattcttaaatttggcttcatcacggtgttttgttttataagattctattcgaatctaaagccgaacacacttgatcattaacatatgactaatttaacataattctccggctaattagccatataaattcaaggttgcttaaaattgttgaagaatagccctaaagacgtataatcacttttaatattttttaattttttaacgtgatttgatttgatatcttttaatatactatt

SEQ ID NO: 9 - DNA, 3817 bp, Amaranthus rudis
aacagggaaggccattatgtttcaatcaccaaaattggcccaaatctgaaagagcataggacacgatggtagtaaaaccaggtttataatcagtcaagaaatctaaaacttccaacaatcatacacaaaaccaatggaatcaatattgcagccaattgcagagcgatatgcacaatcatcttcaaaaaagaagctacccggccctgaacaccactgcaaactgtccttcactgcacaatcatcttcgatgcacattccaacctcatccgccattcttcacattcatagttacccgaccagcctctagttaaaatcctgatgagtaatactgtcaaaccaaatccacgtgaaaaagatgaaagaccacaattgatttgtggtaaaataaataattgggccctgttctttatcttgcaaatacaaccttgtcttctgaaaaagtaggcacaaactccctagagttcggaagaggaacttccttgaaccaaggatgatcaagagcctcttctgcggttatcctcttctcagggtcataggttaatagacggctcaacaaatcaagccccgtgtcagaaagtgcaggagcacctgtaaaagatgtgcgaggaaacttcttatgcaattgattgtacggttggcgaataaagttgaacttgtgcccaggcaattgagaaaatcctggccaaagtttgtcattaggtgtgcccaatgttgcaaacatcttgttaagctgctcaatctcagatttcccatcaaataagggtttattggccaatagttcagccatgatgcaacccacagaccacatatccacagcagttgagtactctgtagctccaagaagaagttcaggagccctgtaccaaagagtaaccaccaaagcagtataaggcttcaacgggctaccatactgacgtgccataccgaagtcgcatatctttagctctcccttgttatttaccaaaagatttgaagtcttcaaatctctatgtagcacccaattatgatgaagatacttcacaccctccaaaagttgaagcattaaacacttaacttcactatatctgaaaggctgcttcctagtctgcattaaagccttaagatcatgctctacatgatccatcaccatgtaaatgctatcaaagccatccgggctatcatcaaccactacttctcgaacattcacaattgaaggatgattcaaggacacaagagtattgatttccctcaagtaataaacaggaaacccctctctttggtcacccaacttcatcttctttaaggcaacaatctcaccactttcttcatctcttgctttgtacacaataccataacttccttcactaattttattaagcttcttatacttgaacacacttctgcatccctgaagcatatttctatttcctctcccggaaaccccgggctctccaccgtcatcactcgcagcacaatcctcaccatcactcgcatcaacctccatacagtcatctctcttcaaacccaccattttctattttactataccttacaaaatccctaatctgcaatcatccatttacgctatccctttttccgattctcttaaacccacttcttcttcttcaatcctccgccgccctcttcaaatctcatcatcttcttctcaatcacctaaacctaaacctccttccgctactataactcaatcaccttcgtctctcacctatgataaaccctcttcttttgtttcccgatttagccctgaagaacccagaaaaggttgcgatgttctcgttgaagctcttgaacgtgaaggtgttaccgatgtttttgcttaccctggtggagcatccatggaaattcatcaagctcttactcgttctaatatcattagaaatgttcttcctcgacatgaacaaggtggggttttcgctgctgaaggctacgctcgtgctactggacgtgttggagtttgtattgccacttctggtccgggtgctactaatcttgtttccggttttgctgatgcacttcttgactcagtcccgcttgtcgccattactgggcaagttcctcggcgtatgattggtactgatgcttttcaagagactcctattgttgaggtaactcgatcaattactaagcataattatttggtgttagatgttgaggatatccctagaattgttaaggaagctttctttttagctaattctggtagacctggacctgttttgattgatattcctaaagatattcagcaacaattggttgttcctaactgggaacagcccattaaattgggtgggtatctttctaggttgcctaaacccactttttctgctaatgaagagggacttcttgatcaaattgtgaggttggtgggtgagtctaagagacctgtgctgtatactggaggtgggtgtttgaattctagtgaagaattaaggaaatttgtcgagttgacagggattccggttgctagtactttaatggggttgggggctttcccttgtactgatgatttatcacttcaaatgttgggaatgcacgggactgtgtacgcgaattacgcggtggataaggctgatttgttgcttgctttcggggttaggtttgatgatcgagtgactgggaagctcgaggcgtttgctagccgggctaagattgtgcacatcgatatcgattctgctgaaatcgggaagaataagcaacctcatgtgtcgatttgtggtgatattaaagtggcattacggggttgaataatattttggaatctagaaaaggaaaggtgaaattggatttctctaattggagggaggaattgaatgagcagaaaaagaagtttcctttgagttttaagactttcggggatgcaattcctccgcaatatgccattcaggttctggacgagttgacgaagggtgatgcgattgtaagtaccggtgttgggcagcaccaaatgtgggctgcccaattctataagtaccgaaatcctcgccaatggctgacctcgggtggtttgggggctatggggtttggtctaccagccgctattggagctgctgttgctcgaccagatgcggtggttgtagacattgatggggacgggagttttatcatgaatgttcaagagttggctacgattagggtggagaatctcccggttaaaatcatgctcttgaacaatcaacatttaggtatggttgttcaattggaagatcgattttacaaagctaaccgggcacatacatacctcggaaatccatccaattcttccgaaatcttcccggatatgctcaaatttgctgaagcatgtgatataccagcagcccgtgttaccaaggtgagcgatttaagggctgcaattcaaacaatgttggatactccaggaccatatctgctggatgtaatcgtaccacatcaggagcatgtgctgcctatgatccctagcggtgccgccttcaaggacaccatcacagagggtgatggaagaagggcttattagttggttggagatctttatttggagaagcttttttgtatgtatgttagtagttccataaacttctatattctctggccgttctctcgtttagctgtttttatgttagtttgttgttttcatgttgcttgttactttgaaaaacccttttgtgtttaagacccattagcatgaataatcttcctatactattgtatggttcgatacacgctagttgtttctttttattaacgagttaaagacaactattagtcggtgtaaaaaaaaagaaaaaaaaacaaaacatgtcggccgcctcggtctctactgagacacgcaacaggggatagg

SEQ ID NO: 10 - DNA, 2404 bp, Amaranthus rudis
ctttctccattttcgcttagctctcctctcacacaaattacctccatttccaaccttccaagctttcaacaatggcgtccacttcttcaaacccaccattttcctattttactaaaccttacaaaatccctaatcgtcaatcctacatttacgctctccctttttccaattctcataaacccacttcttcttcaatcctccgccgcgctcttcaaatctcgtcatcttcttctcaatcacctaaacctaaacctccttccgctactataactcaatcaccttcatctctcaccgatgataaaccctcttcttttgtttcccgatttagccctgaggaacccagaaaaggttgcgatgttctcgttgaagctcttgaacgtgaaggtgttaccgatgtttttgcttaccctggtggagcttccatggaaatccatcaagctcttactcgttctaatatcattagaaatgttcttcctcgacatgaacaaggtggggttttcgctgctgaaggctacgctcgtgctactggacgtgttggagtttgtattgccacttctggtccgggtgctactaatcttgtttccggttttgctgatgcacttcttgactcagtcccgcttgtcgccattactgggcaagttcctcggcgtatgattggtactgatgcttttcaagagactcctattgttgaggtaactcgatcaattactaagcataattatttggtgttagatgttgaggatatccctagaattgttaaggaagctttctttttagctaattctggtagacctggacctgttttgattgatattcctaaagatattcagcaacaattggttgttcctaactgggaacagcccattaaattgggtgggtatctttctaggttgcctaaacccactttttctgctaatgaagagggacttcttgatcaaattgtgaggttggtgggtgagtctaagagacctgtgctgtatactggaggtgggtgtttgaattctagtgaagaattaaggaaatttgtcgagttgacagggattccggttgctagtactttaatggggttgggggctttcccttgtactgatgatttatcacttcaaatgttgggaatgcacgggactgtgtacgcgaattacgcggtggataaggctgatttgttgcttgctttcggggttaggtttgatgatcgagtgactgggaagctcgaggcgtttgctagccgggctaagattgtgcacatcgatatcgattctgctgaaatcgggaagaataagcaacctcatgtgtcgatttgtggtgatattaaagtggcattacggggttgaataatattttggaatctagaaaaggaaaggtgaaattggatttctctaattggagggaggaattgaatgagcagaaaaagaagtttcctttgagttttaagactttcggggatgcaattcctccgcaatatgccattcaggttctggacgagttgacgaagggtgatgcgattgtaagtaccggtgttgggcagcaccaaatgtgggctgcccaattctataagtaccgaaatcctcgccaatggctgacctcgggtggtttgggggctatggggtttggtctaccagccgctattggagctgctgttgctcgaccagatgcggtggttgtagacattgatggggacgggagttttatcatgaatgttcaagagttggctacgattagggtggagaatctcccggttaaaatcatgctcttgaacaatcaacatttaggtatggttgttcaattggaagatcgattttacaaagctaaccgggcacatacatacctcggaaatccatccaattcttccgaaatcttcccggatatgctcaaatttgctgaagcatgtgatataccagcagcccgtgttaccaaggtgagcgatttaagggctgcaattcaaacaatgttggatactccaggaccatatctgctggatgtaatcgtaccacatcaggagcatgtgctgcctatgatccctagcggtgccgccttcaaggacaccatcacagagggtgatggaagaagggcttattagttggttggagatctttatttggagaagcttttttgtatgtatgttagtagttccataaacttctatattctctggccgttctctcgtttagctgtttttatgttagtttgttgttttcatgttgcttgttactttgaaaaacccttttgtgtttaagacccattagcatgaataatcttcctatactattgtatggttcgatacacgctagttgtttctttttattaacgagttaaagacaactattagtcggtgtaaaaaaaaagaaaaaaaaacaaaacatgtcggccgcctcggtctctactgagacacgcaacaggggatagg

SEQ ID NO: 11 - DNA, 1364 bp, Amaranthus rudis
tcttccttcttggtgattccctttctccattttcgcttagctctcctctcacacaaattacctccatttccaaccttccaagctttcaacaatggcgtccacttcttcaaacccaccattttctattttactaaaccttacaaaatccctaatcgtcaatcctacatttacgctctccctttttccaattctcataaacccacttcttcttcaatcctccgccgcgctcttcaaatctcatcatcttcttctcaatcacctaaacctaaacctccttccgctactataactcaatcaccttcatctctcaccgatgataaaccctcttcttttgtttccagatttagccctgagaacccagaaaaggttgcgatgttctcgttgaagctcttgaacgtgaaggtgttaccgatgtttttgcttaccctggtggagcttccatggaaatccatcaagctcttactcgttctaatatcattagaaatgttcttcctcgacatgaacaaggtggggttttcgctgctgaaggctacgctcgtgctactggacgtgttggagtttgtattgccacttctggtccgggtgctactaatcttgtttccggttttgctgatgcacttcttgactcagtcccgcttgtcgccattactgggcaagttcctcggcgtatgattggtactgatgcttttcaagagactcctattgttgaggtaactcgatcaattactaagcataattatttggtgttagatgttgaggatatccctagaattgttaaggaagctttctttttagctaattctggtagacctggacctgttttgattgatattcctaaagatattcagcaacaattggttgttcctaactgggaacagcccattaaattgggtgggtatctttctaggttgcctaaacccactttttctgctaatgaagagggacttcttgatcaaattgtgaggttggtgggtgagtctaagagacctgtgctgtatactggaggtgggtgtttgaattctagtgaagaattaaggaaatttgtcgagttgacagggattccggttgctagtactttaatggggttgggggctttcccttgtactgatgatttatcacttcaaatgttgggaatgcacgggactgtgtacgcgaattacgcggtggataaggctgatttgttgcttgctttcggggttaggtttgatgatcgagtgactgggaagctcgaggcgtttgctagccgggctaagattgtgcacatcgatatcgattctgctgaaatcgggaagaataagcaacctcatgtgtcgatttgtggtgatattaaagtggcattacgggggttgaataatattttggaa

SEQ ID NO: 12 - DNA, 2528 bp, Amaranthus rudis
tataagtaccgaaatcctcgccaatggctgacctcgggtggtttgggggctatggggtttggtctaccagccgctattggagctgctgttgctcgaccagatgcggtggttgtagacattgatggggacgggagttttatcatgaatgttcaagagttggctacgattagggtggagaatctcccggttaaaatcatgctcttgaacaatcaacatttaggtatggttgttcaatgggaagatcgattttacaaagctaaccgggcacatacatacctcgggaatccttccaaatcttcagaaatcttcccggatatgctgaaatttgctgaagcatgtgatataccagcagcccgtgttaccaaggtgagcgatttaagggctgcaattcaaacaatgttggatactccaggaccatatctgctggatgtaatcgtaccacatcaggagcatgtgctgcctatgatccctagcggtgccgccttcaaggacaccatcacagagggtgatggaagaagggcttattagttggttggagatctttatagaggagaagcttttttgtatgtatgttagtagttccataaacttctatattctctggccgttctctcgtttagctgtttttatgttagtttgttgttttcatgttgcttgctactttgaaaaacccttttgtgttttagacccattagtatgaataatcttcctatattattgtatggttcgatacacgctagttgtttctttttattaacgagttaaggacaacaattagtcggtgtaaccaagtttgtctcacattgctcgacgttttgttctcctttgatgaatttgaggagtattagggagtttgtttgatactagtgaatcttcatgtcctatactgttttctcgtcttagcggacattggtattgtatctcttggtgggttttttgtgggtataggagtattcgattcgttgttatgttcgactccttcaatgcttttggtgggtttttcaaagaagcaaaaggaagcagaaatggccttagaatgtaaactggtggaatggttaggtacccttctttttttgtgggtgggtgttgccttttatcagccatgtttttatgttcatattttgtggtctttgaggccttatgtttagtgttggtgtctttttcgtcgtattctgtgttccgttctgaaatgtggatctcaaagacatagatgatgaggaagagggtcgggataagtgcagtgttttactccaaaagcgagcctagtaaggacggaaacgagtcaacattgcgagatgatacgcgttcgagtaagacatgaaaatctgtctgcctgctcagtgctcacaatggtaaattgtactgtaaatgattgttctgtcatgtgggttttttcatctggaaatgtgtatctaaaatggttcttgtcagttgattgtatcatcaattcaccgaggattacaccatttgctgcaattttgctcattccatttctaaatttggcctcgggtatttcgtttattaaggctctatttgattctaaagccgattcgcctagtaaattttgggggttcgctcaaaattgttgaaaaaagcccaaactcaatcataactcgcttttttcgattagcgatcagcggggagattagcaaattatgacattgtctatgaccatcttcataatcactttcggccttcattagttggttcccatctgtcattgtctctacactatccttatatgatcttcatcaccaatgctactactaactaaacctagtagctttcgctaacttgccgttcttcaacaacaaacttccatcttaataactctccgtttctcttgagatcttcaacaacgaactcttttaacctcgtaacattacaatgagttcctttgttaaaatgtttcaataaattccaatgacttcaataagccctaaagacgtataatcacttctaatatcttttaattttttaacgtggtctgatttaatatcttttaatatactattttttttaatcccactctgatatcaattgttgtgaaattaggctcattgtatgctacaaatttgaggggaaaactatgaacaataattctttaacaaacaagaaaaatagaaagttaaaagataattactcatcaagtaaatcatgtgtactttttattcgtttcttgttgcatatgatgtttgattccaagaaacaatcgaaaacaatcattttattagttgtatcattgataagagtaagattgcgtaccctaaatgagagtcgcttattaagattggggtaatgcaaatgcgggtccctttgggttaggaaattagatgaaagttccttagcgtaaatctttatggttggattgatagtagggccataattaaactttgttgaatgtttgactcaatttctaggaatacttgaacacaaattcttgctataaacggtctatagcatagagggtgtaatgggccaacccatttttacactttccaaaaacagcaactgaaatttccattggg

SEQ ID NO: 13 - DNA, 1737 bp, Amaranthus rudis
aaaaaaaaagcaaagaatttagaatccaaatcaatcttgatattcaagggtatttaagtaattagagaacaaccatagttaagttaagcgcctccactcatttctcttcgtccttctcggtgattccctttctccattttcgcttagctctcctctcacacaaattacctccatttccaaccttccaagctttcaacaatggcgtccacttcttcaaacccaccattttcctattttactaaaccttacaaaatccctaatcgtcaatcctacatttacgctctccctttttccaattctcataaacccacttcttcttcaatcctccgccgcgctcttcaaatctcgtcatcttcttctcaatcacctaaacctaaacctccttccgctactataactcaatcaccttcatctctcaccgatgataaaccctcttcttttgtttcccgatttagccctgaggaacccagaaaaggttgcgatgttctcgttgaagctcttgaacgtgaaggtgttaccgatgtttttgcttaccctggtggagcttccatggaaatccatcaagctcttactcgttctaatatcattagaaatgttcttcctcgacatgaacaaggtggggttttcgctgctgaaggctacgctcgtgctactggacgtgttggagtttgtattgccacttctggtccgggtgctactaatcttgtttccggttttgctgatgcacttcttgactcagtcccgcttgtcgccattactgggcaagttcctcggcgtatgattggtactgatgcttttcaagagactcctattgttgaggtaactcgatcaattactaagcataattatttggtgttagatgttgaggatatccctagaattgttaaggaagctttctttttagctaattctggtagaactgacctgttttgattgatattcctaaagatattcagcaacaattggttgttcctaactgggaacaacccattaaattgggtgggtatctttctaggttgcctaaacccacttattctccttatgaagagggacttcttgatcaaattgtgaggttggtggttgaagaagccattgatgaagatggttgaagaattcaaatcaatgttggggttttgaaggttttgttgtgtgccattgatgaagagatttaaggaagaaatcattaatgggtagattgaggaagaaggtgatgaagaagctattgatgaagatggtaacatgttgttccaggtaactaaaaccgattgttctttaaaagcggagacccccaaagttcgagtctttaaaagataaacgcaagtttaaacctttaaaagcaaatgagctaaagttcgtacctttagaatcaaattttccaaaataatattaaccatcttatcgatttgcgtgctgaaaaatcggcgcctaaatattcatttcgattgtattttcaaactaggagccctataagaattataattatgtccatatttcaaaaaaaaattacactattaaaaaatttaggaaaaattacctaaaataatccaatcttttattcatttttctagaataatcctaacttttgattaaccatgaataataaaaccaattttagggtcacttattcaagaacattgttacccaaatagtgactgatttttgtaggtttttttttcggaaattcggaattagtatatatgaaaaagaaaaaaagaaaacactgaatcatgcatcctt

SEQ ID NO: 14 - DNA, 1719 bp, Amaranthus rudis
aaaaaaaaaaaaaaaagcaaagaatttagaatccaaatcaatcttgatattcaagggtatttaagtaattagagaacaaccatagttaagttaagcgcctccactcatttctcttcgtccttctcagtgattccctttctccattttcgcttagctctcctctcacacaaattacctccatttccaaccttccaagctttcaacaatggcgtccacttcttcaaacccaccatttttctattttactaaaccttacaaaatccctaatcgtcaatcctacatttacgctctccctttttccaattctcataaacccacttcttcttcttcttcttcttcaatcgtccgccgcgctcttcaaatctcattatcttcttctcaatcacctaaacctaaacctccttccgctactataactcaatcaccttcatctctcaccgatgataaaccctcttcttttgtttcccgatttagccctgatgaacccagaaaaggttgcgatgttcttgttgaagctcttgaacgtgaaggtgttaccgatgtttttgcttaccctggtggagcttccatggaaatccatcaagctcttactcgttctaatatcattagaaatgttcttcctcgacatgaacaaggtggggttttcgctgctgaaggctacgctcgtgctactggacgtgttggagtttgtattgccacttctggtccgggtgctactaatcttgtttccggttttgctgatgcacttcttgactcagtcccgcttgtcgccattactgggcaagttcctcggcgtatgattggtactgatgcttttcaagagactcctattgttgaggtaactcgatcaattactaagcataattatttggtgttagatgttgaggatatccctagaattgttaaggaagctttctttttagctaattctggtagacctggacctgttttgattgatattcctaaagatattcagcaacaattggttgttcctaactgggaacagcccattaaattgggtgggtatctttctaggttgcctaaacccacttattctgctaatgaagagggacttcttgatcaaattgtgaggttggtgggtgagtctaagagacctgtgctgtatactggaggtgggtgtttgaattctagtgaagaattaaggaaatttgtcgggttgacagggattccggttgctagtactttaatggggttgggggctttcccttgtactgatgatttatcacttcaaatgttgggaatgcacgggactgtgtacgcgaattacgcggtggataaggctgatttgttgcttgctttcggggttaggtttgatgatcgagtgactgggaagctcgaggcgtttgctagccgggctaagattgtgcacatcgatattgattctgctgaaatcgggaagaataagcaacctcatgtgtcgatttgtggtgatattaaagtggcattacaggggttgaataagattttggaatctagaaaaggaaagctgaaattggatttctctaattggagggaggagttgaatgagcagaaaaagaagtttcctttgagttttaagactttcggggatgcaattcctccgcaatatgccattcaggttctggacgagttgacgaagggtgatgcgattgtaagtaccggtgttgggcagcaccaaatgtgggctgcccaattctataagtaccgaaatcctcgcca

SEQ ID NO: 15 - DNA, 725 bp, Amaranthus rudis
aaatttgctgaagcatgtgatataccagcagcccgtgttaccaaggtgagcgatttaagggctgcaattcaaacaatgttggatactccaggaccatatctgctggatgtaatcgtaccacatcaggagcatgtgctgcctatgatccctagcggtgccgccttcaaggacaccatcacagagggtgatggaagaagggcttattagttggttggagatctttatagaggagaagcttttttgtatgtatgttagtagttccataaacttctatattctctggccgtcctctcgtttagctgtttttatgttagtttattgttttcatgttgcttgttactttgaaaaacccttttgtgttttaagacccattagcatgaataatcttcctatactattgtatggttcgatacacgctagttgtttctttttattaacgagttaaagacaactattagtcggtgtaatcaagtctgtctcacattgcttgacattttgttctcctttgatgaatttgatattaggaagtttgtttggtactagtgaatcttcatgtcctatactgttttctcgtcttagcggacattggtattgtatctcttggtgggttttttgtgggtataggagtattcgattcgttgttatgttcgactccttcaatgcttttggtgggtttttcaaagaagaaaaaggaagcaaaaatggccttagaatgtaaagtggtg

SEQ ID NO: 16 - DNA, 451 bp, Amaranthus rudis
ttaaagtggcattacgggggttgaataatattttggaatctagaaaaggaaaggtgaaattggatttctctaattggagggaggagttgaatgagcagaaaaagaagtttcctttgagttttaagactttcggggatgcaattcctccgcaatatgccattcaggttctggacgagttgacgaagggtgatgcgattgtaagtaccggtgttgggcagcaccaaatgtgggctgcccaattctataagtaccgaaatcctcgccaatggctgacctcgggtggtttgggggctatggggtttggtctaccagccgctattggagctgctgttgctcgaccagatgcggtggttgtagacattgatggggacgggagttttatcatgaatgttcaagagttggctacgattagggtagagaatctcccggttaaaatcatgctcttgaacaa

SEQ ID NO: 17 - DNA, 375 bp, Amaranthus rudis
tctttctaggttgcctaaacccactttttctgctaatgaagagggacttcttgatcaaattgtgaggttggtgggtgagtctaagagacctgtgctgtatactggaggtgggtgtttgaattctagtgaagaattaaggaaatttgtcgagttgacagggattccggttgctagtactttaatggggttgggggctttcccttgtactgatgatttatcacttcaaatgttgggaatgcacgggactgtgtacgcgaattacgcggtggataaggctgatttgttgcttgctttcggggttaggtttgatgatcgagtgactgggaagctcgaggcgtttgctagccgggctaagattgtgcacatcgatatcga

SEQ ID NO: 18 - DNA, 2302 bp, Amaranthus spinosus
cttccttctcagttattccatttctccattctcgcttagctttcctctctcacaaattacctccatttccaagcttccaagctttcaacaatggcgtccagttcttcaaacccaccattattctattttactaaacttaacaaaatccctaatcggcaatcatccatttacgctatcccgttttctaattctcttaaacccacttcttcttcttcaatcctccgccgccctcttcaaatctcatcatcttcttctcaatcacctaaacctaaacctccttccgctactataactcagtcaccttcatctctcaccgatgataaaccctcttcttttgtttcccgatttagccctgaagaacccagaaaaggttgcgatgttctcgttgaagctcttgaacgtgaaggtgttaccgatgtttttgcttaccctggtggagcatccatggaaatccatcaagctcttactcgttctaatatcattagaaatgttcttcctcgacatgaacaaggtggggttttcgctgctgaaggctacgctcgtgctactggacgcgttggagtttgtattgccacttctggtccaggtgctactaatcttgtctctggtcttgctgatgcacttcttgactcagtcccgcttgtcgccattactgggcaagttccccggcgtatgattggtactgatgcttttcaagagactccaattgttgaggtaactcgatccattactaagcataattatttggtgttagatgttgaggatattcctagaattgttaaggaagctttctttttagctaattctggtagacctggacctgttttgattgatattcctaaagatattcagcaacaattagttgttcctaattgggaacagcccattaaattgggtgggtatctttctaggttgcctaaacccacttattctgctaatgaagagggacttcttgatcaaattgtaaggttagtgggtgagtctaagagacctgtgctgtatactggaggtgggtgtttgaattctagtgaagaattgaggaaatttgtcaaattgacagggattccggtggctagtactttaatggggttgggggctttcccttgtactgatgatttatcacttcatatgctgggaatgcacgggactgtgtatgcgaattacgcggttgataaggccgatttgttgcttgctttcggggttaggtttgatgatcgagtgactggtaagctcgaggcgtttgctagccgggctaagattgtgcacatcgatatcgattctgctgaaatcgggaagaataagcaacctcatgtgtcgatttgtggtgatgttaaagtggcattacaggggttgaataagattttggaatctagaaaaggaaaggtgaaattggatttctctaattggagggaggagttgaatgagcagaaagagaagtttcctttgagttttaagactttcggggatgcaattcctccgcaatacgccattcaggttcttgacgagttgacgaagggtgatgcggttgtaagtaccggtgttgggcagcaccaaatgtgggctgcccaattctataagtaccgaaatcctcgccaatggctgacctcgggtggtttgggggctatggggtttggtctacctgctgctattggagctgctgttgctcgaccagatgcggtggttgtagacatcgatggggatgggagttttatcatgaatgttcaagagttggctacgattagggtggagaatctcccggttaaaatcatgctcttgaacaatcaacatttaggtatggttgttcaatgggaagatcgattttacaaagctaaccgggcacatacatacctcgggaatccttccaattcttccgaaatcttcccggatatgctcaaattcgctgaagcatgtgatataccagcagctcgtgttaccaaggtgagcgatttaagggctgcaattcaaacaatgttggatactccaggaccgtatctgctggatgtaatcgtaccacatcaggagcatgtgctgcctatgatccctagcggtgccgccttcaaggacaccatcactgagggtgatggaagaagggcttattagttggttggagatctttatagaggagaagctttttgtatgtatgttagtagttccataaacttctatattctctggccggtctctcgtgtagctgtttttatgttagtttgttgttttcatgttgcgtgctactttgaaaaaacccttttgtgttttagacccattagcatgaataatcatcctatattattgtatggttcga

SEQ ID NO: 19 - DNA, 2334 bp, Amaranthus thunbergii
tctgggtgattccctttctccattctcgcttaactttcctctcacacaaattaccttcatttccaacctttcaagctttcaacaatggcgtccaattcttcaaacccaccatttttctattttactataccttacaaaatccctaatctgcaatcatccatttacgctatccctttttccgattctcttaaacccacttcttcttcttcaatcctccgccgccctcttcaaatctcatcatcttcttctcaatcacctaaacctaaacctccttccgctactataactcaatcaccttcgtctctcaccgatgataaaccctcttcttttgtttcccgatttagccctgaagaacccagaaaaggttgcgatgttctcgttgaagctcttgaacgtgaaggtgttaccgatgtttttgcttaccctggtggagcatccatggaaattcatcaagctcttactcgttctaatatcattagaaatgttcttcctcgacatgaacaaggtggggttttcgctgctgaaggctacgctcgtgctactggacgcgttggagtttgtattgccacttctggtccaggtgctactaatcttgtttctggtcttgctgatgcacttcttgactcagtccctcttgtcgccattactgggcaagttccccggcgtatgattggtactgatgcttttcaagagactccaattgttgaggtaactcgatccattaccaagcataattatttggtgttagatgttgaggatattcctagaattgttaaggaagctttctttttagctaattctggtagacctggacctgttttgattgatattcctaaagatattcagcaacaattagttgttcctaattgggaacagcccattaaattgggtgggtatctttctaggttgcctaaacccacttattctgctaatgaagagggacttgatcaaattgtaaggttagtgggtgagtctaagagacctgtgctgtatactggaggtgggtgtttgaattctagtgaagaattgaggaaatttgtcgaattgacaggtattccggtggctagtactttaatggggttgggggctttcccttgtactgatgatttatgtcttcatatgttgggaatgcacgggactgtgtacgcgaattacgcggttgataaggccgatttgttgcttgcttttggggttaggtttgatgatcgagtgactggtaagctcgaggcgtttgctagccgggctaagattgtgcacatcgatatcgattctgctgaaatcgggaagaataagcaacctcatgtgtcgatttgtggtgatgttaaagtggcattacaggggttgaataagattttggaatctagaaaaggaaaggtgaaattggatttctctaattggagggaggagttgaatgagcagaaaaagaagtttcctttgagttttaagactttcggggatgcaattcctccgcaatacgccattcaggttcttgacgagttgacgaagggcgatgcggttgtaagtactggtgttgggcagcaccaaatgtgggctgcccaattctataagtaccgaaatcctcgccaatggctgacctcgggtggtttgggggctatggggtttggtctaccagctgctattggagctgctgttgctcgaccagatgcggtggttgtagacattgatggggatgggagttttatcatgaatgttcaagagttggctacgattagggtagagaatctcccggttaaaatcatgctcttgaacaatcaacatttaggtatggttgttcaatgggaagatcgattttacaaagctaaccgggcacatacatacctcgggaatccttccaattcttccgaaatcttcccggatatgctcaaatttgctgaagcatgtgatataccagcagcccgtgttaccaaggtgagcgatttaagggctgcaattcaaacaatgttggatactccaggaccgtatctgctggatgtaatcgtaccacatcaggagcatgtgctgcctatgatccctagcggtgccgccttcaaggacaccataacagagggtgatggaagaagggcttattagttggttggagatctttatagaggagaatcttttttgtatgtatgttagtagttccataaacttctatattctctggccgttctctcgtttagctgtttttatgttagtttgttgttttcatgttgcttgctactttgaaaaacccttttgtgttttagacccattagcatgaataatcttcctatattattgtatggttcgatacacgctagttgtttctttttattatcgagttaaagacaa

SEQ ID NO: 20 - DNA, 2360 bp, Amaranthus viridis
cgcctccactctgggtgattccctttctccattctcgcttagctttcctctcacacaaattacctttatttccaacctttcaagctttcaacaatggcgtccacttcttcaaacccaccattttcctcttttactaaacctaacaaaatccctaatctgcaatcatccatttacgctatccctttttccaattctcttaaacccacttcttcttcttcaatcctccgccgccctcttcaaatctcatcatcttcttctcaatcacctaaacctaaacctccttccgctactataactcaatcaccttcgtctctcaccgatgataaaccctcttcttttgtttcccgatttagccctgaagaacccagaaaaggtagcgatgttctcgttgaagctcttgaacgtgaaggtgttaccgatgtttttgcttaccctggtggagcatccatggaaattcatcaagctcttactcgttctaatatcattagaaatgttcttcctcgacatgaacaaggtggggttttcgctgctgaaggctacgctcgtgctactggacgcgttggagtttgtattgccacttctggtccaggtgctactaatcttgtttctggtcttgctgatgcacttcttgactcagtccctcttgtcgccattactgggcaagttccccggcgtatgattggtactgatgcttttcaagagactccaattgttgaggtaactcgatccattaccaagcataattatttggtgttagatgttgaggatattcctagaattgttaaggaagctttctttttagctaattctggtagacctggacctgttttgattgatattcctaaagatattcagcaacaattagttgttcctaattgggaacagcccattaaattgggtgggtatctttctaggttgcctaaacccacttattctgctaatgaagagggacttcttgatcaaattgtaaggttagtgggtgagtctaagagacctgtgctgtatactggaggtgggtgtttgaattctagtgaagaattgaggaaatttgtcgaattgacaggtattccggtggctagtactttaatggggttgggggctttcccttgtactgatgatttatgtcttcatatgttgggaatgcacgggactgtgtacgcgaattacgcggttgataaggccgatttgttgcttgcttttggggttaggtttgatgatcgagtgactggtaagctcgaggcgtttgctagccgggctaagattgtgcacatcgatatcgattctgctgaaatcgggaagaataagcaacctcatgtgtcgatttgtggtgatgttaaagtggcattacaggggttgaataagattttggaatctagaaaaggaaaggtgaaattggatttctctaattggagggaggagttgaatgagcagaaaaagaagtttcctttgagttttaagactttcggggatgcaattcctccgcaatacgccattcaggttcttgacgagttgacgaagggcgatgcggttgtaagtactggtgttgggcagcaccaaatgtgggctgcccaattctataagtaccgaaatcctcgccaatggctgacctcgggtggtttgggggctatggggtttggtctaccagctgctattggagctgctgttgctcgaccagatgcggtggttgtagacattgatggggatgggagttttatcatgaatgttcaagagttggctacgattagggtagagaatctcccggttaaaatcatgctcttgaacaatcaacatttaggtatggttgttcaatgggaagatcgattttacaaagctaaccgggcacatacatacctcgggaatccttccaattcttccgaaatcttcccggatatgctcaaatttgctgaagcatgtgatataccagcagcccgtgttaccaaggtgagcgatttaagggctgcaattcaaacaatgttggatactccaggaccgtatctgctggatgtaatcgtaccacatcaggagcatgtgctgcctatgatccctagcggtgccgccttcaaggacaccataacagagggtgatggaagaagggcttattagttggttggagatctttatagaggagaatcttttttgtatgtatgttagtagttccataaacttctatattctctggccgttctctcgtttagctgtttttatgttagtttgttgttttcatgttgcttgctactttgaaaaacccttttgtgttttagacccattagcatgaataatcttcctatattattgtatggttcgatacacgctagttgtttctttttattatcgagttaaagacaactactaatcggtgt

SEQ ID NO: 21 - DNA, 2357 bp, Amaranthus viridis
cttccttctcagttattccatttctccattctcgcttagctttcctctctcacaaattacctccatttccaagcttccaagctttcaacaatggcgtccagttcttcaaacccaccattattctattttactaaacttaacaaaatccctaatcggcaatcatccatttacgctatcccgttttctaattctcttaaacccacttcttcttcttcaatcctccgccgccctcttcaaatctcatcatcttcttctcaatcacctaaacctaaacctccttccgctactataactcagtcaccttcatctctcaccgatgataaaccctcttcttttgtttcccgatttagccctgaagaacccagaaaaggttgcgatgttctcgttgaagctcttgaacgtgaaggtgttaccgatgtttttgcttaccctggtggagcatccatggaaatccatcaagctcttactcgttctaatatcattagaaatgttcttcctcgacatgaacaaggtggggttttcgctgctgaaggctacgctcgtgctactggacgcgttggagtttgtattgccacttctggtccaggtgctactaatcttgtttctggtcttgctgatgcacttcttgactcagtccctcttgtcgccattactgggcaagttccccggcgtatgattggtactgatgcttttcaagagactccaattgttgaggtaactcgatccattaccaagcataattatttggtgttagatgttgaggatattcctagaattgttaaggaagctttctttttagctaattctggtagacctggacctgttttgattgatattcctaaagatattcagcaacaattagttgttcctaattgggaacagcccattaaattgggtgggtatctttctaggttgcctaaacccacttattctgctaatgaagagggacttcttgatcaaattgtaaggttagtgggtgagtctaagagacctgtgctgtatactggaggtgggtgtttgaattctagtgaagaattgaggaaatttgtcgaattgacaggtattccggtggctagtactttaatggggttgggggctttcccttgtactgatgatttatgtcttcatatgttgggaatgcacgggactgtgtacgcgaattacgcggttgataaggccgatttgttgcttgcttttggggttaggtttgatgatcgagtgactggtaagctcgaggcgtttgctagccgggctaagattgtgcacatcgatatcgattctgctgaaatcgggaagaataagcaacctcatgtgtcgatttgtggtgatgttaaagtggcattacaggggttgaataagattttggaatctagaaaaggaaaggtgaaattggatttctctaattggagggaggagttgaatgagcagaaaaagaagtttcctttgagttttaagactttcggggatgcaattcctccgcaatacgccattcaggttcttgacgagttgacgaagggcgatgcggttgtaagtactggtgttgggcagcaccaaatgtgggctgcccaattctataagtaccgaaatcctcgccaatggctgacctcgggtggtttgggggctatggggtttggtctaccagctgctattggagctgctgttgctcgaccagatgcggtggttgtagacattgatggggatgggagttttatcatgaatgttcaagagttggctacgattagggtagagaatctcccggttaaaatcatgctcttgaacaatcaacatttaggtatggttgttcaatgggaagatcgattttacaaagctaaccgggcacatacatacctcgggaatccttccaattcttccgaaatcttcccggatatgctcaaatttgctgaagcatgtgatataccagcagcccgtgttaccaaggtgagcgatttaagggctgcaattcaaacaatgttggatactccaggaccgtatctgctggatgtaatcgtaccacatcaggagcatgtgctgcctatgatccctagcggtgccgccttcaaggacaccataacagagggtgatggaagaagggcttattagttggttggagatctttatagaggagaatcttttttgtatgtatgttagtagttccataaacttctatattctctggccgttctctcgtttagctgtttttatgttagtttgttgttttcatgttgcttgctactttgaaaaacccttttgtgttttagacccattagcatgaataatcttcctatattattgtatggttcgatacacgctagttgtttctttttattatcgagttaaagacaactactaatcggtgt

SEQ ID NO: 22 - DNA, 2075 bp, Ambrosia trifida
cactcattcaacaatggcggccatctctcccacaaacccttccttcaccaccaaaccgccgtcatcttccgccaccacaccaccaccacgttccaccttcctcccccgtttcacattcccaataacctccacttccccaatacgacaccgtttccacatatccaacgttctctccgaccacaaacccaccataacccattccccatcaccaaccgacccattcatctcccgttatgccccagaccagccccgtaaaggcgccgacgtcctagtcgaagctttggaacgtgaaggcgtcaccgacgtcttcgcatacccaggaggcgcctcaatggagatccatcaagctctgacccgctccaaaaccatccgaaacgtccttccccgtcatgaacagggcggcgtcttcgccgccgaaggctacgcacgcgcctccggtcttcctggcgtctgtattgctacctctggtcctggagctacaaacctagtgagtggtcttgctgatgcattattagacagtgttccaatggttgcaataaccggtcaagttcctagaagaatgattggtaccgatgcgtttcaagaaacccctattgttgaggtaacacgttccattactaaacataattatttagttttggatgttgaagatattcctagggttgttagggaggctttttatcttgcgtcctcgggtcgacccggtccggttttaattgatgtgcctaaggatatacagcagcagttggtagtgcctaaatgggatgagcctatgaggttaccgggttatttgtctcggttgccgaaaacggagaataatgggcagttggaacagattgttaggttggttagtgaggcgaagaggccggttttgtatgtagggggtgggtgtttgaattcggcggatgagttgaggcggtttgtggagttaacggggataccggttgcgagtactttgatggggcttggagcgtatcctgcttcgagtgatttgtcgttacatatgcttgggatgcatgggacggtttatgcgaattatgcggtggataagagtgatttgttgcttgcgtttggggtgaggtttgatgatcgtgtgacggggaagcttgaggcgtttgctagtagggcgaagattgttcatattgatattgattcagcggagattgggaagaataagcagcctcatgtgtcgatttgtggtgatattaaggtcgcgttacaagggcttaacgagattttggaggaaaagaattcggtgactaatcttgatttttcgaattggaggaaggagttggacgagcaaaaggttaagtttccgctgagttttaaaacgtttggtgaagctattcctccgcagtatgccattcaagtgcttgatgagttaacgggtgggaatgcgattattagcactggggtcgggcagcatcagatgtgggcagcccagttttacaaatacaacagacctagacaatggctgacctcgggtggactaggggcaatgggttttgggctgcctgcggctattggggcggctgttgcaagacctgatgcagtagtagttgatatcgatggcgatggaagctttataatgaatgttcaagagttagcaaccatccgtgttgaaaacctgcctgttaagattatgttacttaacaatcagcatttgggtatggtggttcagtgggaggatcggttttacaaggcgaatcgggctcatacctacttaggaaatccgtcaaaagagtctgaaatattccccaacatgttgaagtttgctgaagcgtgtgatataccggctgcccgagtgacccgaaaggcagatctaagagcagctattcagaagatgttggatacacctgggccttacttgttggatgtgatcgtgccacatcaagaacatgtgttgcccatgatcccggctggtggaggtttcatggatgtgatcaccgaaggcgatggcagaacgaaatactaagcttcaaagtcgcatcgcatatatagtgtgttatgtaagcagtttgtcggttttgaatgttttgttgtgtaatttagtttctggttatgaatgttatgga

SEQ ID NO: 23 - DNA, 2540 bp, Ambrosia trifida
gaaggcgtcaccgacgtcttcgcgtacccaggcggcgcctcagtggagatccaccaagctctgacccgctccacaaccatccgaaacgtccttccccgtcatgaacagggcggcgtcttcgccgccgaaggctacgcacgcgcctccggtcttcctggcgtctgtattgctacctctggtcctggagctacaaacctagtgagtggtcttgctgatgcattattagacagtgttccaatggttgcaataaccggtcaagttcctagaagaatgattggaaccgatgcgtttcaagaaacccctattgttgaggtaacacgttccattactaaacataattatttagttttggatgtggaagatattcctagggttgttagggaggctttttatcttgcgtcttcgggtcggcccggtccggttttaattgatgtgcctaaggatatacagcagcagttggtagtgcctaaatgggatgagcctatgaggttaccgggttatttgtctcggttgccgaaaacggagaataatgggcagttggaacagattgttaggttggttagtgaggcgaagaggccggttttgtatgtagggggtgggtgtttgaattcggcggatgagttgaggcggtttgtggagttaacggggataccggttgcgagtactttgatggggcttggagcgtatcctgcttcgagtgatttgtcgttacatatgcttgggatgcatgggacggtttatgcgaattatgcggttgataagagtgatttgttgcttgcgtttggggtgaggtttgatgatcgtgtgacggggaagcttgaggcgtttgctagtagggcgaagattgttcatattgatattgattcagcggagattgggaagaataagcagcctcatgtgtcgatttgtggtgatattaaggtcgcgttacaagggcttaacgagattttggaggaaaagaattcggtgactaatcttgatttttcgaattggaggaaggagttggacgaacaaaaggttaagtttccgctgagttttaaaacgtttggtgaagctattcctccgcagtatgccattcaagtgcttgatgagttaacgggtgggaatgcgattattagcactggggtcgggcagcatcagatgtgggcagcccagttttacaaatacaacagacctagacaatggctgacctcgggtggactaggggcaatgggttttgggctgcctgcggctattggggcggctgttgcaagacctgatgcggtagtagttgatatcgatggcgatggaagctttataatgaatgttcaagagttagcaaccatccgtgttgaaaacctgcctgttaagattatgttacttaacaatcagcatttgggtatggtggttcagtgggaggatcggttttacaaggcgaatcgggctcatacctacttaggaaatccgtcaaaagagtctgaaatattccccaacatgttgaagtttgctgaagcgtgtgatataccggctgcccgagtgacccgaaaggcagatctaagagcagctattcagaagatgttggatacacctgggccttacttgttggatgtgatcgtgccacatcaagaacatgtgttgcccatgatcccggctggtggaggtttcatggatgtgatcaccgaaggcgatggcagaacgaaatactaagcttcaaagtcgcatcgcatatatagtgtgttatgtaagcagtttgtcggttttgaatgttttgttttgttgtgtaatttagtttctggttatgaatgttatggatcagtttgtcaacgtttctttaatttaatagctttcatgaataaatttcaaagatttatcttctgttttatgtttatattgaagaccaaagttatgtttatgttacacaccagtgaacatgttttctaaaggtcatatgttgttttctataattccaaaagagtagtttggtgatccgtctctttcagtccatttgtgctctcagttgtgtagatgtcgattatgtatggtcactctgtgctttacattgttgtaccaggtttgaagggtgagtgttcctccacgtttctacctaaattctctcggcggcgcttccatttgtggtggcgttcacggcggttctttaactcatactttaacgttcacctgatgtaatcaaatgttaattactaacgcttttatgtctctttcctctacatcaattataacatgtatttattgcccccttttgttcttagctttaatctatactattaatgtatctggtattaagccttaggtatgaaatttctttcccaaagctgtgcatcgcgaatgcttttagattaatatgttggtttatgtattatgttttcaaggactaaatttacatctgatgcaatgtatacatggttagcaaggtttacaccaaaacatgcagacagattaattaagtaagatgttaaccttgaaaacatatgcaatgttaatactaactcaggtaagatgttaatactaaatttatgtattatgttttcaaggactaaatt

SEQ ID NO: 24 - DNA, 2141 bp, Ambrosia trifida
tccgaaacgtccttccccgtcatgaacagggcggcgtcttcgccgccgaaggctacgcacgcgcctccggtcttcctggcgtctgtattgctacctctggtcctggagctacaaacctagtgagtggtcttgctgatgcattattagacagtgttccaatggttgcaataaccggtcaagttcctagaagaatgattggtaccgatgcgtttcaagaaacccctattgttgaggtaacacgttccattactaaacataattatttagttttggatgttgaagatattcctagggttgttagggaggctttttatcttgcgtcttcgggtcggcccggtccggttttaattgatgtgcctaaggatatacagcagcagttggtagtgcctaaatgggatgagcctatgaggttaccgggttatttgtctcggttgccgaaaacggagaataatgggcagttggaacagattgttaggttggttagtgaggcgaagaggccggttttgtatgtagggggtgggtgtttgaattcggcggatgagttgaggcggtttgtggagttaacggggataccggttgcgagtactttgatggggcttggagcgtatcctgcttcgagtgatttgtcgttacatatgcttgggatgcatgggacggtttatgcgaattatgcggttgataagagtgatttgttgcttgcgtttggggtgaggtttgatgatcgtgtgacggggaagcttgaggcgtttgctagtagggcgaagattgttcatattgatattgattcagcggagattgggaagaataagcagcctcatgtgtcgatttgtggtgatattaaggtcgcgttacaagggcttaacgagattttggaggaaaagaattcggtgactaatcttgatttttcgaattggaggaaggagttggacgagcaaaaggttaagtttccgctgagttttaaaacgtttggtgaagctattcctccgcagtatgccattcaagtgcttgatgagttaacgggtgggaatgcgattattagcactggggtcgggcagcatcagatgtgggcagcccagttttacaaatacaacaaacctagacaatggctgacctcgggtggactaggggcaatgggttttgggctgcctgcggctattggggcggctgttgcaagacctgatgcggtagtagttgatatcgatggcgatggaagctttataatgaatgttcaagagttagcaaccatccgtgttgaaaacctgcctgttaagattatgttacttaacaatcagcatttgggtatggtggttcagtgggaggatcggttttgcaaggcgaatcgggctcatagctacttaggaaatccgtcaaaagagtctgaaatattccccaacatgttgaagtttgccgaagcatgtgatataccggctgcccgagtgacccgaaaggcagatctaagagcagctattcagaagatgttggatacacctgggccttacttgttggatgtgatcgtgccacatcaagaacatgtgttgcccatgatcccggctggtggaggtttcatggatgtgatcaccgaaggcgatggcagaacgaaatactaagcttcaaagtcgcatcgcatatatagtgtgttatgtaagcagtttgtcggttttgaatgttttgttgtgtaatttagtttctggttatgaatgttatggatcagtttgtcaacgtttctttaatttaatagctttcatgaataaatttcaaagatttatcttctgttttatgtttatattgaagaccaaagttatgtttatgttagtgaccagtgaacatgttttctaaaggtcatatgttgttttctataattccaagagttgtttggtgatccgtctctttcagtccatttgtgctctcagttgtgtagatgtcgattatgtatggtcaatagattgtactctgtgctttaccaggtttgaagggtgagtgttcctccacgtttctacctaaattctctcggcggcgcttccatttgtggtggcggtttctactcttaactcatacttaaacgttcacctgatgtaatctatactattaatatatctggtattaagccttaggtatgaaatttctttcccaaagctgtgcat

SEQ ID NO: 25 - DNA, 687 bp, Ambrosia trifida
aaacaaaagaatcgtccgattgtccatcctatgtcgtgaaaaaaaaaagaatagagaaatggtactattgtaaatatatttgagcattcatatggtagcagagccgcccatctgtgttgctattatttcctatatcttctctactattctgtgttgctattatttttagagggtcaaagtatcaaagggtgacgaaccggttcgacctccgactacccgtcagaccggccggtccgcttcaaaacggtctaatattctaaacactgcttggtggaaactgaaaataacatccacatgtttttttgacacttcatcattgacacttcttctattataaccagataataataataatcaaacaccaaccctagaacacactcattcaacaatggcggccatctctcccacaaacccttccctcaccaccaaaccgccgtcatcttccgccgccacaccaccaccacgttccaccttcctcccccgtttcacattcccaataacctccacttccccaatacgacaccgtttccacatatccaacgttctctccgaccacaaacccaccataacccattccccatcaccaaccgacccattcatctcccgttacgctccagaccagccccgtaaaggcgccgacgtcctagtcgaagctttggaacgtgaaggcgtcaccgacgtcttcgc

SEQ ID NO: 26 - DNA, 322 bp, Ambrosia trifida
ccctagaacacactcattcaacaatggcagccatctctcccacaaacccttccttcaccaccaaaccgccgtcatcttccgccgccacaccaccaccacgttccaccttcctcccccgtttcacattcccaataacctccacttccccaatacgacaccgtttccacatatccaacgttctctccgaccacaaacccaccataacccattccccatcaccaaccgacccattcatctcccgttacgctccagaccagccccgtaaaggcgccgacgtcctagtcgaagctttggaacgtgaaggcgtcaccgacgtcttcgc

SEQ ID NO: 27 - DNA, 214 bp, Ambrosia trifida
gaccgacgtcttcgcctacccagacggcgcctcaatggagatacaccaacttctcacccgctccaccactatccgaaacgtcctccggtcacatcctgagatcgtgaacgggtaaatatttgattttctttattataatcatgttatataataattatatcatttaaataacatcgactgattctctattcgtatgttttccacttgatctatg

SEQ ID NO: 28 - DNA, 2572 bp, Chenopodium album
ctgcttggtctggaccatatgtcagaacatttactctcactattgtcattactcactacaccagaggccaccatcatcagagtccgttcaacatcaccactctcctgtctaacacctactccttctctgtagctataatcaggaacgttttgatctgcctggtaatgaaggaattgggagccagaatgaacctgaagattagactgggttgaatcaatcatggaagatccaaataacccatgttcaaaaatcctaaaaacacccaaaaacaaacaaaccccacaaaatagaaagaacatccattgacctaatttctctctcttcaaccttcaatgccttcatcaatggcggctacttcctcaaacccttcattctcccctttcccaaccctctcttccaaaacccctaaaccccaatcctccatttactccctcccttttcccactaaccccaaaacgccatcttccttcctccgccgccctctccaaatctccgcctctcaatccgctaacccaaaaccgccatccgctactcaaaccgctgttccttcccctctcaccgaggaaaacccgcaatctttcgtttcccgatttgcccctgatgaacccagaaaaggctgtgatgtcctcgttgaagctttggagcgtgaaggtgttaccaatgtgtttgcttaccctggtggtgcatcaatggagattcatcaagctctcacgcgctctggttctatcaggaacgtcctcccccggcacgagcaaggtggggttttcgctgcggaagggtatgctcgagctactgggcgcgtgggtgtgtgcattgcaacctctggtcctggtgccactaatcttgtatcgggtctcgctgatgcgctgcttgattctgtccctttggttgcgatcactggtcaggtgcctcgccgaatgattggaactgatgcatttcaggagactcctattgttgaggttactcgttctatcactaagcataattatttggttttagatgttgaggatattcctagagttgttaaggaagcgtttttatttagctaattctggtaggcctggacctgttttgattgatattcctaaagatattcagcaacaattggttgtgcctaattgggatcagcctattaagcttggtgggtatgtttctaggctgccaaaatcgaagttttcggcgaatgaggaagggcttcttgagcagattgtgaggttgatgagtgaggctaagaagcctgtgttgtatgtgggaggtgggtgtttgaattctagtgaggaattgaggaaattcgtcgaattgacagggattccggtggctagtactttgatggggttaggagcttacccttgtaatgatgaattgtcccttcatatgttgggaatgcacgggactgtgtacgcgaattatgctgttgataaggcggatttgctgcttgctttcggggttaggtttgatgatcgtgtgacagggaagctcgaggcgtttgctagccgagctaagattgtgcacattgatattgattctgctgagattgggaagaataagcagcctcatgtgtcgatttgtgctgatgttaagctggcgttgaagggtatgaataagattctggagtctcgaaaagggaagttgaatttagattactctagttggagggaggagttgggtgagcagaagaagaagtttccattgagttttaagacctttggtgaggctattcctccccaatacgccattcagatgctcgatgagctaactgatggtaatgctgttataagtactggtgttgggcaacatcaaatgtgggctgcccagcattacaagtatcgaaaccctcgacagtggctgacctcaggtggtttaggagccatgggattcgggctaccagctgccattggagcagctgtggctcgtccagagtcagtggttgtcgatattgatggggatgggagtttcatcatgaatgtgcaagaattagctaccataagggtggaaaatctgcctgttaagataatgctcttaaacaatcaacatttaggtatggtggttcaatgggaagacagattctacaaagccaatagagcgcatacataccttggaaacccttctaaagagtctgaaatcttccccgatatgctcaaattcgctgaagcctgtgatattcctgctgcccgtgttaccaaggtgagcgagttgagggccgcaatgcagaaaatgttggatactccggggccatacctgctggatgtgattgtacctcatcaagagcatgtgctgcctatgatcccaagtggtgccgccttcaaagatatcattaacgagggtgatggaagaacatcttattaatcgcattatcgatgatgatgcttaaatctgtatgtataataatatgtttagagaggttatgactgttttctctttaggttagtttgttgttcacatgctgcttgctactactatgattaacttttttgttgtttttgaggtattactatggatgattagctcaaagatttcacaaaagtggtctttgagctatgtatgttctcttgcgaaatacactcgttggctc

SEQ ID NO: 29 - DNA, 2103 bp, Chenopodium album
cctccgccgccctctccaaatctccgcctctcaatccgctaaccccaaacctccatccgctactcaaaccgctgttccatcccctctcactgacgaaaacccccaatctttcgtttcccgatttgcccctgatgaacccagaaaagggtgtgatgttcttgttgaagctttggagcgtgaaggtgttaccaatgtgtttgcttaccctggtggtgcatcaatggagatccatcaagctctcacgcgctctacctcgatcaggaacgtcctcccccggcacgagcaaggtggggttttcgctgcggaagggtatgctcgagctactgggcgcgtgggtgtgtgcattgcaacctctggtcctggtgccactaatcttgtatcgggtctcgctgatgcgctgcttgattctgtccctttggttgcgatcactggtcaggtgcctcgccgaatgattggaactgatgcatttcaggagactcctattgttgaggttactcgttctatcactaagcataattatttggttttagatgttgaggatattcctagagttgttaaggaagcgtttttatttagctaattctggtaggcctggacctgttttgattgatattcctaaagatattcagcaacaattggttgtgcctaattgggatcagcctattaagcttggtgggtatgtttctaggctgccaaaatcgaagttttcggcgaatgaggaagggcttcttgagcagattgtgaggttgatgagtgaggctaagaagcctgtgttgtatgtgggaggtgggtgtttgaattctagtgaggaattgaggaaattcgtcgaattgacagggattccggtggctagtactttgatggggttaggagcttacccttgtaatgatgaattgtcccttcatatgttgggaatgcacgggactgtgtacgcgaattatgctgttgataaggcggatttgctgcttgctttcggggttaggtttgatgatcgtgtgacagggaagctcgaggcgtttgctagccgagctaagattgtgcacattgatattgattctgctgagattgggaagaataagcagcctcatgtgtcgatttgtgctgatgttaagctggcgttgaagggtatgaataagattctggagtctcgaaaagggaagttgaatttagattactctagttggagggaggagttgggtgagcagaagaagaagtttccattgagttttaagacctttggtgaggctattcctccccaatacgccattcagatgctcgatgagctaactgatggtaatgctgttataagtactggtgttgggcaacatcaaatgtgggctgcccagcattacaagtatcgaaaccctcgacagtggctgacctcaggtggtttaggagccatgggattcgggctaccagctgccattggagcagctgtggctcgtccagagtcagtggttgtcgatattgatggggatgggagtttcatcatgaatgtgcaagaattagctaccataagggtggaaaatctgcctgttaagataatgctcttaaacaatcaacatttaggtatggtggttcaatgggaagacagattctacaaagccaatagagcgcatacataccttggaaacccttctaaagagtctgaaatcttccccgatatgctcaaattcgctgaagcctgtgatattcctgctgcccgtgttaccaaggtgagcgagttgagggccgcaatgcagaaaatgttggatactccggggccatacctgctggatgtgattgtacctcatcaagagcatgtgctgcctatgatcccaagtggtgccgccttcaaagatatcattaacgagggtgatggaagaacatcttattaatcgcattatcgatgatgatgcttaaatctgtatgtataataatatgtttagagaggttatgactgttttctctttaggttagtttgttgttcacatgctgcttgctactactatgattaacttttttgttgtttttgaggtattactatggatgattagctcaaagatttcacaaaagtggtctttgagctatgtatgttctcttgcgaaatacactcgttggctc

SEQ ID NO: 30 - DNA, 2379 bp, Conyza canadensis
cgtgttgtggtcatacatcaccacgacgtctgtgatggtaccgaattgatcaaagtaattcttgaaatcacttccacacacactactcctagctctcattttttatttcctttttcatccccagcaaaaacacgcacacataaattaaattcaaacgaatcaaaccctaaaaacaacaaaaaaaaataatacaatctcacacacacattttcaaacatggcggccgtaacttcaccaaacccacctttcaccaccaccaccacaaaaccaccgcattccgccaccacatttcaccgtcccaccaccactcatttatccttcccaaccccaccaaaacgaaaccgtttccttcacatcaccaacgtcctctcggaccacaaacccatcactaccaccactacaaccaccgttccaccaccttcattcacttcccgtttcgccgccgaccaaccccggaagggctccgacgttctcgtagaagccctcgaacgtgaaggcgtcaccgacgtcttcgcttaccctggtggcgcgtcaatggagatccaccaagctctcacgcgctccaccaccatccgcaacgtcctcccccgccatgaacaaggtggcatcttcgccgcagaaggctacgcacgtgcctccggtctccccggcgtctgtatagccacttccggtcccggcgccacaaaccttgtctccggccttgctgacgcgcttcttgacagtgtccccgtcgttgccatcaccggccaagttccccggcgaatgatcggaactgatgcttttcaagaaacacccattgttgaggtaacaagatccattactaaacataactatttggttttagatgttgatgatattccaagaattgttagagaagctttttatcttgcccggtcgggtcgacccggacccgttttgattgatattccaaaagatatacaacaacagttatgtgtgcctaaatgggatgagcccatgaggcttcctggttatttatctaggttacctaagccacctaatgatggtttactagaacaaattgtgaggttagttggagagtcgaaaaggccggttttgtatgtaggtggtggttgtttgaattcgagtgatgagttgagacggtttgttgagcttacgggtattccggtagctagtactttaatgggtcttgggtcttatccagcttcgagtgatttgtctcttcaaatgcttggaatgcatggaactgtttatgcgaattatgctgttgataaggcggatttgttgcttgcgtttggggttaggtttgatgaccgtgtgactggaaagcttgaagcttttgctagtagagctaagattgttcatattgatattgactctgctgagattgggaagaataagcagccacatgtgtcggtttgtggtgatattaagattgcgttacagggtcttaacaagattttagaagggaggcgtgagatgagtaatcttgatttttcggcgtggagggcagagttggatgaacaaaaggtgaaccatccgttgagttttaaaacgttcggtgaagctattccaccgcaatatgctattcaggtgcttgatgagttaacgggtgggaatgctattataagtactggggtcgggcaacatcagatgtgggctgctcagttttacaagtacaacagacctagacagtggttgacttcaggtggactaggggctatgggctttggactgcctgcagccattggtgcagccgttgcaagacctgatgcagtggtagtggatatcgatggtgatggaagttttatcatgaatgttcaagagttggctactatccgagtggaaaatcttcctgtcaaggttttgttactcaataatcagcatttgggtatggtggttcaatgggaggatcgtttctacaaggcaaatagggcgcatacctacttggggaacccatcaaaggaggctgaaatatttccaaacatgttgaagtttgccgaagcgtgtgatataccagctgcacgagtgacccgtaaagctgatctacgggcggctattcagaagatgttggatactcctgggccttacttgttggatgtcattgtgccgcatcaagaacatgttttgccgatgattcctgctggtgggggcttcatggatgtgatcaccgagggtgatggtagaacgaagtattgagcttcaaagtcacaacttagtttcaagtttcaaccactgtatgtaaacatctagcatctttacttaagaggtgtgagcagtttgttggatttgaagttaatttcttgttgtgtattttagtttctggttttttgaatgttccgtagtagtgtattgactgttcttttagtagcctcatgaataaatgtctttttttccttg

SEQ ID NO: 31 - DNA, 5989 bp, Conyza canadensis
caaaattaaaatttaaaagtactggatgttcaaagttaacaaacaagataaaaataatatgtgacttgataaaccatatattgttgtctatcgagggtgatcgacctgcatcttcatatccctagtgttgtgtctcgactttttgcatgtgtcatcattgtcaagaaccaattctattgtatcataacgtttacactagctaatcaacccaggttctacctgagcattttattaaaattttaaaagcaaaaaaaattttaaaaagtgtatataatttttgttattgatatattataactcggttttgagatattaaattaattaacatgataatttatatatattagtatatattgcattaacaaaacataaaaagacattttataatattatattaaaaaaaatttactttgattcgaataaaagaataaatttgtagacatcataaataaaagaaaacattttgaaaatatttaatgggctatttatctttaaaaagatttttgattaaatatgacattataaatagataaaacattttaaagaaatttgtaaacatgacacatcataattgtttttaaaaataatttaaaaagaatccttctttattatatataaagattacatattaaatatatgttgtttcaatcttacctttctttttaaataaacttagctaactttgatagtttgttttttattttttttatttttaaacaacagattgattttattaatagttggttgaaaattgatcaaccaataaaaagaaaaaattaaatacaaagaagaggacttttcaaccattcatcccaagatatttgcttctttttatagcgataccataaaaatgaatgagttataatcgaatcaacaagaacatcatgtcttttattggagcaaccgaagactttataactttgatagttgagttgcgaaaatttatttaaagttcgactgggatatttctaatctactagctacaaacacttgagctaaaattgaaccttgaacatggtaagtaaatcattttggagagatttcatgctttctctgtatcttaattctatttgtctaattggtttggtcgcaacccgaaacatggttagaattacataaaaaacacaacgaagtgaaatccggtagctcgaccttcgttcgttgggagtttttcctcgtgtcttgggtcactgtaattggcacgaggttttttcactccttttgtagttcttacagttaatatttcggaaagagtctaaatttattgtattgctttttttagattgtaattataattataccctattacaactagtgccttgttagttgtttattttaaataatattttctgtcgttctaggaaaaaaaaaattgaaccttgaacacttaatgcggaagtagttaatacttgcaaacttaaggaataagttaagtaggctttgatgctatagatagtcctaagccatcactcttcaaaacacaatttacacaatatttctagaaaaatcaaaacttccatagatatgtgaaaataataaaatggatgtatatacaaaaaaaaaaacataataaaaaattgaaaaacttatacacgcgtacaagccaatgattatagtctaactggttagagacattttaggtttatctaaagttttgagtcgatctttaggaatgataagtttaggttttttttttctctgaatatttataacggtccatggtcaacattttgttttctaagatacgtgcaagacttaccattatatggtgatgtttctctaatgtcacataccgaccaaatgtttgtacaaaaataaaaataaatacgtgtataaaagtcggcaaacgaaaattaaaaaaacaggatctcatacattcacttccacacacactactcctagctctcattttttatttcctttttcatccccagcaaaaacacgcacacataaattaaattcaaacgaatcaaaccctaaaaacaacaaaaaaaaaataatacaatctcacacacacattttcaaacatggcggccgtaacttcaccaaacccacctttcaccaccaccaccacaaaaccaccgcattccgccaccacatttcaccgtcccaccaccactcatttatccttcccaaccccaccaaaacgaaaccgtttccttcacatcaccaacgtcctctcggaccacaaacccatcactaccaccactacaaccaccgttccaccaccttcattcacttcccgtttcgccgccgaccaaccccggaagggctccgacgttctcgtagaagccctcgaacgtgaaggcgtcaccgacgtcttcgcttaccctggtggcgcgtcaatggagatccaccaagctctcacgcgctccaccaccatccgcaacgtcctcccccgccatgaacaaggtggcatcttcgccgcagaaggctacgcacgtgcctccggtctccccggcgtctgtatagccacttccggtcccggcgccacaaaccttgtctccggccttgctgacgcgcttcttgacagtgtccccgtcgttgccatcaccggccaagttccccggcgaatgatcggaactgatgcttttcaagaaacacccattgttgaggtaacaagatccattactaaacataactatttggttttagatgttgatgatattccaagaattgttagagaagctttttatcttgcccggtcgggtcgacccggacccgttttgattgatattccaaaagatatacaacaacagttatgtgtgcctaaatgggatgagcccatgaggcttcctggttatttatctaggttacctaagccacctaatgatggtttactagaacaaattgtgaggttagttggagagtcgaaaaggccggttttgtatgtaggtggtggttgtttgaattcgagtgatgagttgagacggtttgttgagcttacgggtattccggtagctagtactttaatgggtcttgggtcttatccagcttcgagtgatttgtctcttcaaatgcttggaatgcatggaactgtttatgcgaattatgctgttgataaggcggatttgttgcttgcgtttggggttaggtttgatgaccgtgtgactggaaagcttgaagcttttgctagtagagctaagattgttcatattgatattgactctgctgagattgggaagaataagcagccacatgtgtcggtttgtggtgatattaagattgcgttacagggtcttaacaagattttagaagggaggcgtgagatgagtaatcttgatttttcggcgtggagggcagagttggatgaacaaaaggtgaaccatccgttgagttttaaaacgttcggtgaagctattccaccgcaatatgctattcaggtgcttgatgagttaacgggtgggaatgctattataagtactggggtcgggcaacatcagatgtgggctgctcagttttacaagtacaacagacctagacagtggttgacttcaggtggactaggggctatgggctttggactgcctgcagccattggtgcagccgttgcaagacctgatgcagtggtagtggatatcgatggtgatggaagttttatcatgaatgttcaagagttggctactatccgagtggaaaatcttcctgtcaaggttttgttactcaataatcagcatttgggtatggtggttcaatgggaggatcgtttctacaaggcaaatagggcgcatacctacttggggaacccatcaaaggaggctgaaatatttccaaacatgttgaagtttgccgaagcgtgtgatataccagctgcacgagtgacccgtaaagctgatctacgggcggctattcagaagatgttggatactcctgggccttacttgttggatgtcattgtgccgcatcaagaacatgttttgccgatgattcctgctggtgggggcttcatggatgtgatcaccgagggtgatggtagaacgaagtattgagcttcaaagtcacaacttagtttcaagtttcaaccactgtatgtaaacatctagcatctttacttaagaggtgtgagcagtttgttggatttgaagttaatttcttgttgtgtattttagtttctggttttttgaatgttccgtagtagtgtattgactgttcttttagtagcctcatgaataaatgtctttttttccttgcctgcgtagttttgtagaagtaatcttctgtttctatgtttatagcaaggaccaaaagaagagtattagagcccctggtctaaaagtcggatatctgaagtcaaattttagcccctattaagatatgtctctttttgattgtggtcaatactagctgtaagataccatttgagatcagcaattacccgttgcggtttcattttggtttggtctggtctggtctggtctggtctatttcttgttgtgtagtttctgctatttgtgggctatatgttctggttttcttgggttactgtgtttgggcttagtattacaatctattagttttgaagttggttcatatttagtaaactataaattttcaaaaactattcttgatcggtccagcatcagtatatactggttcagaaacttgatagatgttgctcaatctttccgtcctgaatggggcattgattgttaggatgtttttgtatagggtgactaatatttctggaaggatgttcggtttggtagtgtttccgaacaggtgtaggctgcttctgagtgggcagagtacgtaatctcatcacctactccttggggagggtttgacttgattttgagtcaagggtataagtcttgcaattgtagtttgcgttaggcagtggtcaatgatttattactaacttagcgttatattttccagctacaagtgctataagttaatgatttagtactaacacagaatgtagttcatttatgcatcaacgtaattattttccacactaaatttttgtgtgtgagatgacaataccggatgatgaaactttttatactaagcaaagtgagtttcttgtttgatcgaatgactatgatttatatatcacttcccaaatagaacgcaattaggtggttttaagattggagtagagcagaccatcttcaagaactagtccagagcgagttggatactgggagtatacatcttttggggtacagttttgatggcgtttattaatattaatttcaacaaaccattttacatgctaaaaatagtggagtacctcaagttaaaacagctcaaacaggttaaaatacatctaagtttaaggcacaaaactgtctaaaaactgtaaacatctgtattgctctaaaaaaaactccgatttaaggcacttgtggcactgctgtagtttcaaacgatttcctcctaacaagtaagcacgtaatatttgaagaacgagtgctcatgttttcaggactgcataacacaaagtcgggcctgtggagtgctaagtggaggcgatcttcgcccataaccattgcagttgcatcaagcaaaacatgccattggtttctatgggcttcggacacccaatgcattgagtagtgggtcccatttacattcgcaggataagagaacaagccttttgggctttgcttacttttccttctaaaatattgactgagttgtgaacctttgatcctcagatctaaccatgtctcgggtgctgatatcacttttgcgtccttgtaacctgcaaacgcttttatgtagtcatgttcttcgtttatgattgtcatgtagtaattacccctgaaaaatgggtaactttcacccaccaacatcatggcatcacgatagcttgaggtgaataaaacaagatactcttcatcaggcaacccacactgcttcaaaactttgtttcttgcttgaatttcaggtattgagatgaagcttccaagatatgatgactttttagtaaggatatccagtaatcttgatggctcgagctgaattcttaccagatcatgga

SEQ ID NO: 32 - DNA, 5989 bp, Conyza canadensis
cacaaaattaaaatttagaagtactggatgttcaaagttaacaaacaagataaaaataatatgtgacttgataaaccatatattgttgtctatcgagggtgatcgacctgcatcttcatatccctagtgttgtgtctcgactttttgcatgtgtcatcattgtcaagaaccaattctattgtatcataacgtttacactagctaatcaacccaggttctacctgagcattttattaaaattttaaaagcaaaaaaaattttaaaaagtgtatataatttttgttattgatatattataactcggttttgagatattaaattaattaacatgataatttatatatattagtatatattgcattaacaaaacataaaaagacattttataatattatattaaaaaaaatttactttgattcgaataaaagaataaatttgtagacatcataaataaaagaaaacattttgaaaatatttaatgggctatttatctttaaaaagatttttgattaaatatgacatcataaataaataaaacattttaaagaaatttgtaaacatgacacatcataattgtttttaaaaataatttaaaaagaatccttctttattatatataaagattacatattaaatatatgttgtttcaatcttacctttctttttaaataaacttagctaactttgatagtttgttttttattttttttatttttaaacaacagattgattttattaatagttggttgaaaattgatcaaccaataaaaagaaaaaattaaatacaaagaagaggacttttcaaccattcatcccaagatatttgcttctttttatagcgataccataaaaatgaatgagttataatcgaatcaacaagaacatcatgtcttttattggagcaaccgaagactttataactttgatagttgagttgcgaaaatttatttaaagttcgactgggatatttctaatctactagctacaaacacttgagctaaaattgaaccttgaacatggtaagtaaatcattttggagagatttcatgctttctctgtatcttaattctatttgtctaattggtttggtcgcaacccgaaacatggttagaattacataaaaaacacaacgaagtgaaatccggtagctcgaccttcgttcgttgggagtttttcctcgtgtcttgggtcactgtaattggcacgaggttttttcactccttttgtagttcttacagttaatatttcagaaagagtctaaatttattgtattgctttttttagattgtaattataattataccctattacaactagtgccttgctagttgtttattttaaataatattttctgtcgttctaggaaaaaaaaaattgaaccttgaacacttaatgcggaagtagttaatacttgcaaacttaaggaataagttaagtaggctttgatgctatagatagtcctaagccatcactcttcaaaacacaatttacacaatatttctagaaaaatcaaaacttccatagatatgtgaaaataataaatggatgtatatacaaaaaaaaaacataataaaaaattgaaaaacttatacacgcgtacaagccaatgattatagtctaactggttagagacattttaggtttatctaaagttttgagtcgatctttaggaatgataagtttaggttttttttttctctgaatatttataacggtccatggtcaacattttgttttctaatatacgtgcaagacttaccattatatggtgatgtttctctaatgtcacataccgaccaaatgtttgtacaaaaataaaaataaatacgtgtataaaagtcggcaaacgaaaattaaaaaaacaggatctcatacattcacttccacacacactcctcctagctctcattttttatttcctttttcatccccagcaaaaacacgcacacataaattaaattcaaacgaatcaaaccctaaaaacaaccaaaaaaaaataatacaatctcacacacacattttcaaacatggcggccgtaacttcaccaaacccacctttcaccaccaccaccacaaaaccaccgcattccgccaccacatttcaccgtcccaccaccactcatttatccttcccaaccccaccaaaacgaaaccgtttccttcacatcaccaacgtcctctcggaccacaaacccatcactaccaccactacaaccaccgttccaccaccttcattcacttcccgtttcgccgccgaccaaccccggaagggctccgacgttctcgtagaagccctcgaacgtgaaggcgtcaccgacgtcttcgcttaccctggtggcgcgtcaatggagatccaccaagctctcacgcgctccaccaccatccgcaacgtcctcccccgccatgaacaaggtggcatcttcgccgcagaaggctacgcacgtgcctccggtctccccggcgtctgtatagccacttccggtcccggcgccacaaaccttgtctccggccttgctgacgcgcttcttgacagtgtccccgtcgttgccatcaccggccaagttccccggcgaatgatcggaactgatgcttttcaagaaacacccattgttgaggtaacaagatccattactaaacataactatttggttttagatgttgatgatattccaagaattgttagagaagctttttatcttgcccggtcgggtcgacccggacccgttttgattgatattccaaaagatatacaacaacagttatgtgtgcctaaatgggatgagcccatgaggcttcctggttatttatctaggttacctaagccacctaatgatggtttactagaacaaattgtgaggttagttggagagtcgaaaaggccggttttgtatgtaggtggtggttgtttgaattcgagtgatgagttgagacggtttgttgagcttacgggtattccggtagctagtactttaatgggtcttgggtcttatccagcttcgagtgatttgtctcttcaaatgcttggaatgcatggaactgtttatgcgaattatgctgttgataaggcggatttgttgcttgcgtttggggttaggtttgatgaccgtgtgactggaaagcttgaagcttttgctagtagagctaagattgttcatattgatattgactctgctgagattgggaagaataagcagccacatgtgtcggtttgtggtgatattaagattgcgttacagggtcttaacaagattttagaagggaggcgtgagatgagtaatcttgatttttcggcgtggagggcagagttggatgaacaaaaggtgaaccatccgttgagttttaaaacgttcggtgaagctattccaccgcaatatgctattcaggtgcttgatgagttaacgggtgggaatgctattataagtactggggtcgggcaacatcagatgtgggctgctcagttttacaagtacaacagacctagacagtggttgacttcaggtggactaggggctatgggctttggactgcctgcagccattggtgcagccgttgcaagacctgatgcagtggtagtggatatcgatggtgatggaagttttatcatgaatgttcaagagttggctactatccgagtggaaaatcttcctgtcaaggttttgttactcaataatcagcatttgggtatggtggttcaatgggaggatcgtttctacaaggcaaatagggcgcatacctacttggggaacccatcaaaggaggctgaaatatttccaaacatgttgaagtttgccgaagcgtgtgatataccagctgcacgagtgacccgtaaagctgatctacgggcggctattcagaagatgttggatactcctgggccttacttgttggatgtcattgtgccgcatcaagaacatgttttgccgatgattcctgctggtgggggcttcatggatgtgatcaccgagggtgatggtagaacgaagtattgagcttcaaagtcacaacttagtttcaagtttcaaccactgtatgtaaacatctagcatctttacttaagaggtgtgagcagtttgttggatttgaagttaatttcttgttgtgtattttagtttctggttttttgaatgttccgtagtagtgtattgactgttcttttagtagcctcatgaataaatgtctttttttccttgcctgcgtagttttgtagaagtaatcttctgtttctatgtttatagcaaggaccaaaagaagagtattagagcccctggtctaaaagtcggatatctgaagtcaaattttagcccctattaagatatgtctctttttgattgtggtcaatactagctgtaagataccatttgagatcagcaattacccgttgcggtttcattttggtttggtctggtctggtctggtctggtctatttcttgttgtgtagtttctgctatttgtgggctatatgttctggttttcttgggttactgtgtttgggcttagtattacaatctattagttttgaagttggttcatatttagtaaactataaattttcaaaaactattcttgatcggtccagcatcagtatatactggttcagaaacttgatagatgttgctcaatctttccgtcctgaatggggcattgattgttaggatgtttttgtatagggtgactaatatttctggaaggatgttcggtttggtagtgtttccgaacaggtgtaggctgcttctgagtgggcagagtacgtaatctcatcacctactccttggggagggtttgacttgattttgagtcaagggtataagtcttgcaattgtagtttgcgttaggcagtggtcaatgatttattactaacttagcgttatattttccagctacaagtgctataagttaatgatttagtactaacacagaatgtagttcatttatgcatcaacgtaattattttccacactaaatttttgtgtgtgagatgacaataccggatgatgaaactttttatactaagcaaagtgagtttcttgtttgatcgaatgactatgatttatatatcacttcccaaatagaacgcaattaggtggttttaagattggagtagagcagaccatcttcaagaactagtccagagcgagttggatactgggagtatacatcttttggggtacagttttgatggcgtttattaatattaatttcaacaaaccattttacatgctaaaaatagtggagtacctcaagttaaaacagctcaaacaggttaaaatacatctaagtttaaggcacaaaactgtctaaaaactgtaaacatctgtattgctctaaaaaaaactccgatttaaggcacttgtggcactgctgtagtttcaaacgatttcctcctaacaagtaagcacgtaatatttgaagaacgagtgctcatgttttcaggactgcataacacaaagtcgggcctgtggagtgctaagtggaggcgatcttcgcccataaccattgcagttgcatcaagcaaaacatgccattggtttctatgggcttcggacacccaatgcattgagtagtgggtcccatttacattcgcaggataagagaacaagccttttgggctttgcttacttttccttctaaaatattgactgagttgtgaacctttgatcctcagatctaaccatgtctcgggtgctgatatcacttttgcgtccttgtaacctgcaaacgcttttatgtagtcatgttcttcgtttatgattgtcatgtagtaattacccctgaaaaatgggtaactttcacccaccaacatcatggcatcacgatagcttgaggtgaataaaacaagatactcttcatcaggcaacccacaccgcttcaaaactttgtttcttgcttgaatttcaggtattgagatgaagcttccaagatatgatgactttttagtaaggatatccagtaatcttgatggctcgagctgaattcttaccagatcatgga

SEQ ID NO: 33 - DNA, 2053 bp, Euphorbia heterophylla
caatccaccaccccccgccgctctctccaaatctccaactccactcccaaacccacaatccccgccccctccgtcccctccgccccccaaacccctcccccgcggttcgcccccgacgagccccgcaagggcgccgacattctcgtcgaggccctggagcgccagggcgtcaccgacgtgttcgcctaccccggcggcgcctcaatggagatccaccaagccctaacccgctccccaaccatccgcaacgtcctcccccgccacgagcagggcggcgtcttcgccgctgaaggatacgcccgcgcctccggcaagcccggcgtgtgcatcgcgacctccggcccaggcgccaccaatctcgtcagcggcctcgccgatgcgctcctcgacagcgtccccattgtggccatcaccggccaggtgcctcgccggatgatcggaaccgacgccttccaggaaactccgattgttgaggtaactcgatccataacgaagcacaattatttggtacttgatattgaggatatccctaggattgtgagtgaggcttttttcttggcgtcctctggtcgtcctggtccagttttaatcgatgtgcctaaggatatacagcagcaattagctgttcctaattggaatgtatccatgaaattgcctggttatctatctaggttaccgaaagaccctagcgaattgcaattagagcagattgtgaggctaatttccgagtctaagaaaccagttttgtacgttggaggtgggtgtttgaattccagtgaggaattgaggaaatttgttgaattaaccgggattccagttgctagtactttgatgggtttaggatctttcccacttaaccatgacttatccctgtcaatgctcggaatgcatggaactgtttatgccaattatgcagtggacaaaagtgatcttttacttgcatttggagtacgattcgatgatcgtgtgactggaaagctcgaagcttttgcaagccgggctaaaatagttcacatcgacatcgattcggcggaaatcgggaaaaacaagcagccccatgtgtctatatgtggagatgttaaattagccttgcagggagtcaacaaaattctggagagcaaaagcttcaagagtaagttagatttcgggaaatggagagacgagttaaatgaccaaaaagttaaatatccattgaatttcaagacttttgatgaagcaattcctcctcagtatgccatacaagttctcgacgaattaaccgatggaaatgccataataagtacaggagtcggacaacatcaaatgtggtcggcccaattttacaagtacaaaaagccgaggcaatggctaacttccggagggttaggtgctatgggtttcggacttccggcagcaataggtgcttcggttgctaaccctaatgccgttgtggttgatatcgatggggatgggagtttcataatgaatgtccaggagttagccacgatccgagtcgaaaatctaccaatcaaaatattgcttctgaataaccagcatttgggtatggttgtacaatgggaagaccgtttttacaaggcgaatcgagctcatacttatttgggggacccatcgaaagagtcggagattttccccaatatgttgaagtttgctgaagcttgtggaattcctgctgctcgagtgtcgagaaaacaggatataagaggggcaattcagacaatgttggatactcctggtccgtaccttttggatgtgattgtgccacatcaagaacatgtgttgcctatgatcccaagtggcggcgggtttaaggatataataacggagggtgatgggagattcaagtactagtcttagtcttgttgaggtaataaaatgtatgttttttgtgtaagttgatgctttggtattaggtgtggttggtcttttggtttatggttatgtgtttaatgttgttgttggtttgtgtttggacttgaaacgtgttgcatttgctatgttcttgttagcttggcaaatgattaaagttatctgtaattgttcttgtacttctagg

SEQ ID NO: 34 - DNA, 4912 bp, Euphorbia heterophylla
ttcagtttagttcaattcagcaagttgcagttcaaaagaacagagccttaatgtccaatattgaattgtttgaaatgtactattaccatatgttttaaaaagtgttgtcagtcagatagtcgagacttcgaaataattacaatggacttggacggaatctagatgggagttaaataaatttatattttttaaatattatttaatatataaaaaatataaatttaattaaaaataaattataataaaataaaaaaaataatttaaatttttaaaataacattctaaaaagtccactaaacgatattataaaaatttcgacttaaatacctttttgggttctgttctatacaccaaatgcccttttggtgtctgacctattgagatcgcctttttttatgtctgacgtattcaatatttgcttatttggtacatttcatattcaatttcagtatgataacttaatcgactaaaaagagtcaacaatttatgcatgatcaacaaaatatattcatgtgttcaaaccatattatatgcatttcatattctttgtgttgttagatggatgctcgatgtactaaaataatatagatcaaacactaaataggctaatgttgaatacatcaggcaccaactaggcaaaaagtgaatacatcacgcaccaaacagacaatttcaataggtcaaacaccaaaaaagtatttaatatataaaacaggacctaaaaaaatattcaattatacaaaatttcctactatttaagatcacaacaacattctaaaaaattctacgtaaccgcgagctagctcgagttataaaacactttgtgtttagtaaatagtgaaggtcataaaggtaatttggggtggaccttcaaattttaaaagggaatcgagggccacatatcacactccctcttccgccacaaaacctgcaactctctccttctactctccacaatggcggcggcggcgccttcctctgcagccaccaccatctccaaaccctccgccgtcagatcctcaatctccgcctcccgattctccctcccgttccccatcaaaccccaatccaccaccccccgccgctctctccaaatctccaactccactcccaaacccacaatccccgctccctccgtcccctccgccccccaaacccctcccccgcggttcgcccccgacgagccccgcaagggcgccgacattctcgtcgaggccctggagcgccagggcgtcaccgacgtgttcgcctaccccggcggcgcctcaatggagatccaccaagccctaacccgctccccaaccatccgcaacgtcctcccccgccacgagcagggcggcgtcttcgccgctgaaggatacgcccgcgcctccggcaagcccggcgtgtgcatcgcgacctccggcccaggcgccaccaatctcgtcagcggcctcgccgatgcgctcctcgacagcgtccccattgtggccatcaccggccaggtgcctcgccggatgatcggaaccgacgccttccaggaaactccgattgttgaggtaactcgatccataacgaagcacaattatttggtacttgatattgaggatatccctaggattgtgagtgaggcttttttcttggcgtcctctggtcgtcctggtccagttttaatcgatgtgcctaaggatatacagcagcaattagctgttcctaattggaatgtatccatgaaattgcctggttatctatctaggttaccgaaagaccctagcgaattgcaattagagcagattgtgaggctaatttccgagtctaagaaaccagttttgtacgttggaggtgggtgtttgaattccagtgaggaattgaggaaatttgttgaattaaccgggattccagtagctagtactttgatgggtttaggatcttttccacttaaccatgacttatccctgtcaatgctcggaatgcatggaactgtttatgccaattatgcagtggacaaaagtgatcttttacttgcatttggagtacgattcgatgatcgtgtgactggaaagctcgaagcttttgcaagccgggctaaaatagttcacatcgacatcgattcggcggaaatcgggaaaaacaagcagccccatgtgtctatatgtggagatgttaaattagccttgcagggagtcaacaaaattctggagagcaaaagcttcaagagtaagttagatttcgggaaatggagggacgagttaaatgaccaaaaagttaaatatccattgaatttcaagacttttgatgaagcaattcctcctcagtatgccatacaagttctcgacgaattaaccgatggaaatgcgataataagtacaggagtcggacaacatcaaatgtggtcggcccaattttacaagtacaaaaagccgaggcaatggctaacttccggagggttaggtgctatgggtttcggacttccggcagcaataggtgcttcggttgctaaccctaatgccgttgtggttgatatcgatggggatgggagtttcataatgaatgtccaggagttagccacgattcgagtggaaaatctaccgatcaaaatattgcttctgaataaccagcatttgggtatggttgtacaatgggaagaccgattttacaaggcgaatcgagctcatacttatttgggggacccatcgaaagagtcggagattttccccaatatgttgaagtttgctgaagcttgtggaattcctgctgctcgagtgtcgagaaaacaggatataagaggggcaattcagacaatgttggatactcctggtccgtaccttttggatgtgattgtgccacatcaagaacatgtgttgcctatgatcccaagtggcggcgggtttaaggatataataaccgagggtgatgggagattcaagtactagtcttagtcttgttgaggtaataaaatgtatgttttttgtgtaagttgatgctttggtattaggtgtggttggtcttttggttaatggttatgtgtttaatgttgttgttggtttgtgtttggacttgaaacgtgttgcatttgctatgttcttgttagcttggcaaatgattaaagttatctgtaattgttcttgtacttttaggtaataatatgcttcctagatgaggttttgaagaggttttgctcttgttttctttcactaattttttgttagtgaagtagaaaattctccaaagagggcaaagtataagaaaaaaaccaatatataatattgtagatctatagttgattatagatgaaataagttatcctaaacttctaggagctaaatagaacttattggagcaggactaaactaaatatatgagatatgaattgaactgactgaaatttaagaatagaattccaagaggacaagaccaaaacagaagattgtagtaattgagtccatgaaaaaagatttgatttcaaaagggcctcatcgtaaaataattgttcataatagcaattagtcaattattcatcagtgggttcgtttaagattcttaatcttaatttctcaaatgaaatcctagaaagtttccaactttactaggaaaagagcaatattattgactaaaaatgaattaaatgtttggtccacaaaagtttggaattttcatgtttttgccagattgccatcaagtggaaaacatgtctgcagttggataagaaatggaaaatctatgtgaagttgtgcaaaggaaggccatacaattattttggcagataatgtaaagccaaaatacaatatgcactgcttttaaaagtttatgtgcaacagtttgaatagttagttcagacttttagcagtattataaatggttaggtcatattttcggagactacaattcagctcagtttggagtaaaattcaattcagttgtatgtatttatcgatttacattcaaataaggccttgtttagtttgggtcatattaatttagttcaaccaactttaattttatttactttagttttaaaaaatataaaataacatgacttttgttatacaaatgtaacttcaactcaaaaacacaacaaaagagttttctatatcaatgtaattttggggtatttatcttggcttaaaaagtttcttataataactttttaacttataaaaagtaaaagaagtgtttctttcagctgatttttaatttaaaagtaaaaatatagaagtaaggatttgttacttttctacttttgcttttctttaagacaaaagctataagctaagagaaacacccctttatcaacattggaagttgtttacgggctaggtagcacaaaattggaaactgaaacggaaatgagaaaacccattttcaaaacgtataggtttggataccgtaaggaaacgtgtaaataataaaaaatgtatggatatatttataaatataaaattttttatgcatataatttcattttttcataaaatattaaaatattatttaaaatatattcattaattactaaagacatctccaaccctcgctatctctttttcccctaaaactttttactctccaactctaccttttaaatttttagttcaaaacacatatattattgatttattcttacatatctaactttttattatcattttattcctcctttcctatctaactcaaacaagcataaactcaattaaataataaataaaagaaaaggcaaaaaaaattaagggatgaacaatgctgttttagagcaacatcctctcaaatttgaggcaaagaatgaagctccattattcatctacaaccctaaaatagggttaggttggagatggcgtaaacaattttatttcatgctttcccttggttgtatggttcgtccgagggagaaatcgtaaattcatcaatatcaagttcttaaaaagaacacaatttcaac

SEQ ID NO: 35 - DNA, 3185 bp, Euphorbia heterophylla
cgtcgaggccctggagcgccagggcgtcaccgacgtgttcgcctaccccggcggcgcctcaatggagatccaccaagccctaacccgctccccaaccatccgcaacgtcctcccccgccacgagcagggcggcgtcttcgccgctgaaggatacgcccgcgcctccggcaagcccggcgtgtgcatcgcgacctccggcccaggcgccaccaatctcgtcagcggcctcgccgatgcgctcctcgacagcgtccccattgtggccatcaccggccaggtgcctcgccggatgatcggaaccgacgccttccaggaaactccgattgttgaggtaactcgatccataacgaagcacaattatttggtacttgatattgaggatatccctaggattgtgagtgaggcttttttcttggcgtcctctggtcgtcctggtccagttttaatcgatgtgcctaaggatatacagcagcaattagctgttcctaattggaatgtatccatgaaattgcctggttatctatctaggttaccgaaagaccctagcgaattgcaattagagcagattgtgaggctaatttccgagtctaagaaaccagttttgtacgttggaggtgggtgtttgaattccagtgaggaattgaggaaatttgttgaattaaccgggattccagttgctagtactttgatgggtttaggatctttcccacttaaccatgacttatccctgtcaatgctcggaatgcatggaactgtttatgccaattatgcagtggacaaaagtgatcttttacttgcatttggagtacgattcgatgatcgtgtgactggaaagctcgaagcttttgcaagccgggctaaaatagttcacatcgacatcgattcggcggaaatcgggaaaaacaagcagccccatgtgtctatatgtggagatgttaaattagccttgcagggagtcaacaaaattctggagagcaaaagcttcaagagtaagttagatttcgggaaatggagagacgagttaaatgaccaaaaagttaaatatccattgaatttcaagacttttgatgaagcaattcctcctcagtatgccatacaagttctcgacgaattaaccgatggaaatgccataataagtacaggagtcggacaacatcaaatgtggtcggcccaattttacaagtacaaaaagccgaggcaatggctaacttccggagggttaggtgctatgggtttcggacttccggcagcaataggtgcttcggttgctaaccctaatgccgttgtggttgatatcgatggggatgggagtttcataatgaatgtccaggagttagccacgatccgagtcgaaaatctaccaatcaaaatattgcttctgaataaccagcatttgggtatggttgtacaatgggaagaccgtttttacaaggcgaatcgagctcatacttatttgggggacccatcgaaagagtcggagattttccccaatatgttgaagtttgctgaagcttgtggaattcctgctgctcgagtgtcgagaaaacaggatataagaggggcaattcagacaatgttggatactcctggtccgtaccttttggatgtgattgtgccacatcaagaacatgtgttgcctatgatcccaagtggcggcgggtttaaggatataataactgagggtgatgggagattcaagtactagtcttagtcttgttgaggtaataaaatgtatgttttttgtgtaagttgatgctttggtattaggtgtggttggtcttttggtttatggttatgtgtttaatgttgttgttggtttgtgtttggacttgaaacgtgttgcatttgctatgttcttgttagcttggcaaatgattaaagttatctgtaattgttcttgtacttttaggtaataatatgcttcctagaagaggttttgctcttgttttctttcactaattttttgttagtgaagtagaaaattctccaaagagggcaaagtataagaaaaaaaccaatatataatattgtagatctatagttgattatagatgaaacaagttatcctaaacttctaggagctaaatagaacttattggagcgggactaaactaaatatattagatatgaattgaattgaattgaaatgacgaaatttaagaatagaattccaagaggatgaggccaaaacaaaagattgtagtaattgagtccatgaaaaaagatttgatttcaaaagggcctcatagtaaaataattgttcataatagcaattagtcaattattcatcagtgggttcgtttaagattcttaatcttaatttctcaaatgaaatcctagaaagtttccaactttactaggaaaagagcaatattattgactaaaaatgaattaaatgtttggtccacaaaagtttggaattttcatgtttttgccagattgccatcaagtggaaaacatgtctgcagttggataagaaatggaaaatctatgtgaagttgttgtgcaaaggaaggccatacaattattttggcagataatgtaaagccaaaatacaatatgcactgcttttaaaagtttatgtgcaacagtttgaatagttagttcagacttttagcagtattataaatggttaggtcatattttcggagactacaattcagtttagttgggagtacaattcagttcagttgtgtgtagttatcaatttacattcaaatatggccctgtttagttcaggtcattttagttcatctcaactaactttaatttaatttactttagctttaaaaaatttaaaataacatgacctttggtatataattgtaacttctactcaaaaaaacaacaaaagagttttctatatcaatgtaatttcatcaacatcggaagttttttatgggataggtagcacaaaaatgaaaactaaaacgaaattgggaaaaccattttcaaaaagtataagtttggaaatgtgtaaataataaaaaatatatatggatatatttataaatataaaattttttaagcatataatttcattttttgtataaaatattaaagtattatttaaaatatattcattactctctccggttccaaataaaagaccttttggccttttttatttggttctaaatatttgatcatttagattatccatgcaatatttattattctttctc

SEQ ID NO: 36 - DNA, 363 bp, Commelina diffusa
ctttcgttgaggatgcttggaatgcatggtactgtgagcgcaaattactcagttgataagtctgatttgttgcttgcttttggggttaggtttgatgatagggtgactgggaagctggagacatttgctagtagggcgaagattgtgcacattgatattgatagggctgagattggtaagaacaagcagccccatgtgtcgatttgtgctgatatcaagctggctttgcaggggatgaatgcgatgttggaggagagtggtgtttataagaagtttgactttggtgcgtggagggaggagttggatgtgcagaagaagacttatcctttgagctacaagacatttggggatttgattcctccg

SEQ ID NO: 37 - DNA, 1868 bp, Digitaria sanguinalis
cgttgataaactgatccataacatttttaaccaggaacgaaattacacaacaaaacattaacttcaaaaccgacaaactgcttacagaacacactatatgtgacattgaagctcaatatttcattctgccgtcgccttcggtgatcacatccatgaaacctccaccagccgggatcatgggcaacacatgttcttgatggggcacgatcacatccaacaagtaaggccccggtgtatccaacatcttctgaatagctgctcgtagatctgccttccgggtcactcgggcagctgggatatcacacgcttcagcaaacttcaacatgttagggaatatttcagactcttttgacggatttcctaagtaggtatgagcccgattcgccttgtaaaaccgatcctcccactgaaccaccatacccaaatgctgattgttaagtaacaaaatcttaacaggaagattttcaacacggattgtggctaactcttgaacgttcattataaagcttccatcaccatcgatatcaactactaccgcatcaggtcttgcaacagccgccccgatagcagcgggcaacccaaaacccatcgcccctagtccacctgacgtcagccattgtctaggcttgttgtatttgtaaaactgagcagcccacatctgatgctgcccgaccccagtgctaataatcgcattcccacccgttaactcatcaagcacttgaatggcatactgcggaggaatagcttcgccaaatgttttaaaactcaacggatacttaaccttttgctcatccaattccttcctccagttcgagaaatcaagattagtcaccgaattctttacctccaaaatcttgttcagaccctgtaacgcgaccttaatatcaccacaaatcgacacatgaggctgcttattcttcccaatttccgcagaatcaatatcaatatgaacaatcttagctctgctagcaaaagcctcaagcttccccgtcacacggtcatcaaaccttaccccaaacgcaagcaacaaatcactcttatcaaccgcataattcgcataaaccgtcccatgcatcccaagcatatgcagcgacaaatcactagaagcagggtatgctccaagccccatcaacgtactcgcaaccggtatccccgtaagctccacaaaccaagaaaaggacgctgatgttctcgtcgaagctctggaacgtgaaggcgttacagacgtcttcgcttacccaggtggcgcctccatggagatccaccaagctctcacgcgctcaccaccatccgcaacgttctcccacgtcacgaacagggcggcgtctttgctgccgaaggctacgcacgtgcctccggtcttcccggcgtctgtattgcaacctctggtcctggagctacgaacctagtaagtggtcttgctgatgctttattagacagtgttccaatggttgctattactggtcaagttcccaggagaatgattggaacagatgcgtttcaagaaacccctattgttgaggtaacacgttccattactaagcataattatttagttttggatgtcgaggatattcccaggattgttagggaagctttttatcttgcgtcttctggtcgacccggaccggttttaattgatgtacctaaggatatacagcagcagttggtagtgcctaaatgggatgagcctattaggttacctgggtatttgtctaggttgcctaaaacggagaataatgggcagttggaacagattgttaggttggtgagtgaggccaagaggccggttttgtatgtggggggtgggtgtttgaattcgggggatgagttgaggcggtttgtggagcttacggggataccggttg

SEQ ID NO: 38 - DNA, 5667 bp, Digitaria sanguinalis
ggagtagggaccacatacaacagagtatgatactatacaatgcatctaaaccatgattcaagaatataatcatatggtaatcatgcattaggatccactgacagcagcagatctttgtatggttatatgttcatattccgatggacaatttaacaaacaaaacaaatccttgtggatccattgtggggatattcattttctcagtacaagacacattgaacaaatggttagacaaacccttgtcttcccttcctcctctggttaagaagaagtcttcaatctcactcagagcccaaagaacacaatctataaaaaattgaaacgaaaggcctaataagagtatatcaatatacactaggttacatgtgtttgcaaccagggtcgtgaaagccaatgctactaagtagttttatccattacatggaactcaatattcaagaaaaaacatatccatgattgcaactacaattttaaccatatgtgactactgaaaatcaaaacttttgcaggaacattgcagctatccacagctccactatcccctgaattgctggattgtgatcctttatatttttttttccagagcccgctagaaccataaactgatacaaatcaaacatacgagttaattttactaggattgaaatttttatacggcagatcataaaaccatccatcgctttgaaatggtaatttaatcaatcatgccaacacgacagtacaggacatgcttatatgcacaaaccatatacgtggcctaaaactcttcagggcagttattcaaaaaccaaaccaacagaggcacctactagggttttacatatctgacaagacgcgtcatgatcacttgagccaggcaaaatatcccaaggggatcacaaatatcatattttattctggttgtctcactccgtcaagcacaggctatcaaggaacaataaacaaaaactgccctcattgatcaagaccgcctaataatattgcaaagctcagacctatcgccagcgaaacacaagaagggtctaaatttatcctgaaattaagaaagaaataaaattaaacaagcatgacagttcctctcactgtagggtttgcagcattgcttgaagatgtgccgaaaggggagggaacagagcggggggtgggaggtgacctctgtagtcgacgccggagttgagcttgacgacgacgggtcggcccctgatggacttgagaaagtccgacggcgtcttcaccgccccgccgcccgagccgggcttgtcgccgccgccgctgctcatcttgcgcgctatgcccgtgtgttcgcgcatcgcgggcgagaggcgacccgtttgggctccggattggcggatcccttcgtgccgacctcgtccggtccacccgtttagctggaccccacgtgccagtgagcatacaggaaaacgacagtcgacaaccacgtccgcagtccagtccaaatcgttttttacttcaccatgtcgttaccagcgcacctttctaaagtcactgacacgtcggtcccacgtaggcttgccccaccggtcagtgtgaagcgtgtatacacgtttgtggaggtgtcgccgtcgctttacggcagccatccatgatccatctcaaccacacatctcgcacgcaaataaagtaagccagccaggcacgccctccccactctccccatctccgtgccaccccccaaagtctcaaaccctcgccgccgcctccgagacagccgccgccaccatggccacgacgaccgccgccgccaccgccgcggccgccgcgctgaccagcaccaccaccacctccgcgcgcaggccgaggagccgacccgcgcccctcccgttcgcccgtcgcgccgggcccatccggtgctccgcggcgtcgccggtgacggccccggccacccccgccacaccgctccggccgtggggccccaccgagccccgcaagggcgccgacatcctcgtcgaggccctcgagcgctgcggcgtccgcgatgtcttcgcctaccccggcggcgcgtccatggagatccaccaggcgctcacccgctcccccgtcatcgccaaccacctcttccgccacgagcaaggggaggccttcgctgcctccgggtacgcgcgctcctccggccgcgtcggcgtctgcgtcgccacctcgggccccggcgccaccaacctcgtctccgcgctcgccgacgcgctgctcgattcggtgcccatggtcgccatcacggggcaggtgccccgccgcatgatcggcaccgacgctttccaggagacgccgatcgtcgaggttacccgctcaatcaccaagcacaactacctggtcctcgacgtcgaagacatcccccgcgttgtgcaggaggcgttcttcctcgcctcctctggtcgccccgggccggtgctcgtggacatccccaaggatatccagcagcagatggcggtgccggtctggaacacgcccatgagtctgccagggtacattgcgcgactccccaagcctcctgcgactgaattgcttgagcaggtgctgcgtcttgttggtgagtcacgccgccctgttctttatgttggtggtggctgcgcggcatccggtgaggagttgcgccgctttgtggagatgaccggaatcccagtgacaactactctgatgggccttggcaactttccccagtgacgacccactgtctctccggatgcttggtatgcatggtaccgtgtatgcaaattatgcggtggataaggccgacctgttgcttgcatttggtgtgcggttcgatgatcgtgtgacagggaaaattgaggcttttgcaagcagggctaagattgtgcacattgacattgatccagctgagattggtaagaacaagcagccacatgtgtccatctgtgcggatgtcaagcttgctttgcagggcatgaatgctcttctggaaggaatcacatcaaagaagagtttcgactttggcccatggcaagatgagttggatcagcagaagagggaattccccctagggtacaaatctttcgatgaggagatccagccacaatacgctatccaggttctggatgagctgacaaaaggggaggccatcattgctaccggtgttgggcagcaccagatgtgggcagcacagtactacacttacaagcggccacggcaatggttgtcttcagctggtcttggtgctatgggatttggtttgccggctgcggctggtgctgctgtggccaacccaggtgtaacagttgttgacatcgatggggatggtagcttccaaatgaacattcaggagttggctttgattcatattgagaaccttccagtgaaggtctttgtgctaaacaaccagcacctgggaatggtggtgcagtgggaggacaggttctacaaagccaaccgagcacacacatacttggggaacccagataatgagagtgagatatatccggattttgtgacgattgccaaaggattcaacatcccagcagcccgtgtgacaaagaagagcgacgtccgtgcagcaatcaagaagatgcttgagactccaggtccctacctgttggatatcatcgtcccacaccaggagcatgtgttacctatgatcccgagtggtggcgctttcaaggatatgatactggatggtgatggcaggaccgtgtattgatctgaacttcagcgagtgctgttcttgcctttctttgacatgcatatgagctagtaaaagagtgatgcgtgtcttacctatgtaatgttctcctttgtttcttcgattcctagggcgtcaactctggactgcgtcattttctaatgtgcttgtctgatgtactctggtgtggtaatcttagcttccaaccttctagtcctgcagtctgttgttatcgttagtgcaggcatatatgcatcataagagatcatgtaagtgccttttgctacataataaataagttaataaatgctgctatatatgcagtgggttctgaattctgttcagttgccaactagttgttgcttttgttctcgatttctttcccttgtttctacgattctcctttagctgattccaattcagcataggagtatgttgtatgaaagcattgagcaattgtgcatgaaaggatagggtgtacagcggtgcagcgcacaaggcactcaccgaaaatcagcttgagctgcacaaaggaaccatctccaaacatctgtgcatgaaacactgttgcatttctcattgcgatgtacgcgggcacgctggtcaaagaaagttcagcgccttccaagacaccggagcagtgcagggttgtgaacaaagatcacagctgcggcctttcgcggatggtgaagaagatatgctggagcaacgatcagtatggttcccacggaagaagaaaaggtaaagctgttacagatgctgggccacacaagtagacttgtcaatctggcccaataagactttgggcctccaagatttgggcccgtatttttggaccaagacaaggcctcattacgaatttcgaggtgttaaaaaaatcacgaatttctatgctagaagatgttttaggtgtgggtgcttctttgataccatcattaagaactaaaaatcctctcctacgcgtatgagtgtttaaataggcccaacgcccttgttacatagtacgctgagcacctgaagcaaactttggacatcctttcctttgtaaaagcagccatcccataagacatggcaaaaactagacctttcagtacttgtacttctctattaaggccctagaatcaagtttcagatgaggaagctcaattaagaatgtgtttagattgggagagaaaacactgtagatcgtggtaggtgtaagtggatgaatagtaaaaagtttgatgaataatagaaaattaatgataaacagtaaaaagtgcgttggagcctaagcttattgggacctcactggtcaatccacgagtttctatctcgtgaatcgtgatccattttgtgccattgatgagagacggcaaagggcgcgcctcactataccaaaaaaaaaaaaaaactcccttctgttggaccggacaaaagagagaaagaatcgatgagcgcgatatatggtgactggatcataattgttgctgggctatgctcaccgaacgggcccgtacagaggcccttgccattaactgctaggatctcgactttttctttatcagattcgttcgtccatgatcggacggacaaatgcacagcaaaacgtccattcagagcgtggcggagattacatcattgcactatgtacacaccacagtgttgatcacgcatttctcctgcaaagacgacgaaattgtaggcacacggcgtcacgtaacaacgacgtgaagcccagctaccgtgcgaccgtacgttcgtgcacgtgtcggctaaatagggagcaacgtgttgccaaaacattttcaagagccctcaaggtttgagcacggctactttttcttttcttttctttttttgccgaaaatgaacttcatggatcttagcagatatttaaattgaacatatgtcgtagctatgtatttggcacaagaaaaatgttgtggccgtttgaatttagtaaatgtagagagcctccccatgcatacctgatcgggtgggctcaaaccaatgcagatttgttgcaatcataa

SEQ ID NO: 39 - DNA, 2001 bp, Kochia scoparia
atggcgtctacttctgcaaatcccacttttacccctttcaccagtaaaccccttaaaccccgttctccctttcactctttcccatttccctcaaaccccaaaaccccttcctcttcatttcgcaacctcaaaatcacatcttctctctcttcttcacaacccccgaaaccaccttccgccgtcaaaacccactcaccaccttcccctctcacaaccgacgaacccccgcaaggttttgtttcccgatttgcccctgaccaacccagaaaaggctgcgatgtcctcgttgaggccctcgagcgggagggcgtcaccgacgtgttcgcttatcctggtggcgcatcaatggagattcatcaagctctgactcgctctgattccatacgcaacgtcctgcctcgccacgagcaaggcgggatctttgccgcggaggggtatgctcgtgccacgggccgtgttggtgtctgcattgcgacatctggccctggcgctacgaacctcgtgtccgggtttgctgatgctttgctcgattccgttccactggtggcgatcacggggcaggtgccgcggcgaatgattgggacggatgcttttcaggagactcctattgttgaggtaacacggtctattaccaagcataattatctggtattagatgttgaggatattcctagaattgttaaggaggctttctttttggctaattctggtagacctggacctgttttgattgatattcctaaggatattcagcagcaattggttgtgcctgattgggatcagggggttaggttaggtgggtatgtgtctaggttgccgaaatcggtgttttcggccaatgatgaggggcttcttgagcagattgtgaggttgatgagtgaggctaagaagcctgtgttgtatgtgggaggcgggtgtttgaattctggggaggagttgaggaaattcgtcgagttgactgggattccggtggctagtactttaatgggtttgggcgcttatccctgtaatgatgacttgtctcttcatatgttgggtatgcacgggaccgtgtatgctaattatgctgttgataaggcagatttgttgcttgcctttggggttaggtttgatgatcgtgtgacagggaagcttgaggcgtttgctagccgggctaagatcgtgcatattgatattgattctgctgagattgggaagaataagcaaccccatgtgtcaatatgtgctgatgtcaagtatgcgttgaagggtatgaataagattttggagtctaggaaagggaagttgaatttgaattactctagctggagggaggaattgggtgagcaaaagaagaaattcccattgtcttttaagaccttcggggaagcgattcctcctcagtatgccattcagatgcttgatgagctgaccaatggtaacgctattattagtactggtgttgggcaacatcaaatgtgggctgctcagcattacaagtacagaaaccctcgccaatggctgacctcaggtgggttgggtgccatgggttttggtctaccagccgccattggagctgctgtggctcgacctgatgcagtggtggttgatattgatggcgatgggagtttcattatgaatgttcaagagttggctactattagggtggaaaatctccctgttaagataatgcttttgaataaccaacatttaggtatggtggttcaatgggaagataggttttataaagccaatagggcacatacttaccttggaaacccttcaaaagagtctgaaatcttcccggatatgcttaaatttgctgaggcgtgtgatattcctgctgctcgtgtcaccaaggttggagatttgagggcggccatgcagacaatgttggatactccgggaccttacctgcttgatgtgattgtacctcatcaggagcatgtgctgcctatgattcctagtggtgcagccttcaaggatatcattaacgaaggtgatggaagaacaagttattga

SEQ ID NO: 40 - DNA, 2001 bp, Kochia scoparia
atggcgtctacttctgcaaatcccacttttacccctttcaccagtaaaccccttaaaccccgttctccctttcactctttcccatttccctcaaaccccaaaaccccttcctcttcatttcgcaacctcaaaatcacatcttctctctcttcttcacaacccccgaaaccaccttccgccgtcaaaatccactcaccaccttcccctctcacaaccgacgaacccccgcaaggttttgtttcccgatttgcccctgaccaacccagaaaaggctgcgatgtcctcgttgaggccctcgagcgggagggcgtcaccgacgtgttcgcttatcctggtggcgcatcaatggagattcatcaagctctgactcgctctgattccatacgcaacgtcctgcctcgccacgagcaaggcgggatctttgccgcggaggggtatgctcgtgccacgggccgtgttggtgtctgcattgcgacatctggccctggcgctacgaacctcgtgtccgggtttgctgatgctttgctcgattccgttccactggtggcgatcacggggcaggtgccgcggcgaatgattgggacggatgcttttcaggagactcctattgttgaggtaacacggtctattaccaagcataattatctggtattagatgttgaggatattcctagaattgttaaggaggctttctttttggctaattctggtagacctggacctgttttgattgatattcctaaggatattcagcagcaattggttgtgcctgattggggtcagggggttaggttaggtgggtatgtgtctaggttgccgaaatcggagttttcggccaatgatgaggggcttcttgagcagattgtgaggttgatgagtgaggctaagaagcctgtgttgtatgtgggaggcgggtgtttgaattctggggaggagttgaggaaattcgtcgagttgactgggattccggtggctagtactttaatgggtttgggcgcttatccctgtaatgatgacttgtctcttcatatgttgggtatgcatgggaccgtgtatgctaattatgctgttgataaggcagatttgttgcttgcctttggggttaggtttgatgatcgtgtgacagggaagcttgaggcgtttgctagccgggctaagatcgtgcatattgatattgattctgctgagattgggaagaataagcaaccccatgtgtcaatatgtgctgatgtcaagtatgcgttgaagggtatgaataagattttggagtctaggaaagggaagttgaatttgaattactctagctggagggaggaattgggtgagcaaaagaagaaattcccattgtcttttaagaccttcggggaagcgattcctcctcagtatgccattcagatgcttgatgagctgaccaatggtaacgctattattagtactggtgttgggcaacatcaaatgtgggctgctcagcattacaagtacagaaaccctcgccaatggctgacctcaggtgggttgggtgccatgggttttggtctaccagccgccattggagctgctgtggctcgacctgatgcagtggtggttgatattgatggcgatgggagtttcattatgaatgttcaagagttggctactattagggtggaaaatctccctgttaagataatgcttttgaataaccaacatttaggtatggtggttcaatgggaagataggttttataaagccaatagggcacatacttaccttggaaacccttcaaaagagtctgaaatcttcccggatatgcttaaatttgctgaggcgtgtgatattcctgctgctcgtgtcaccaaggttggagatttgagggcggccatgcagacaatgttggatactccgggaccttacctgcttgatgtgattgtacctcatcaggagcatgtgctgcctatgattcctagtggtgcagccttcaaggatatcattaacgaaggtgatggaagaacaagttattga

SEQ ID NO: 41 - DNA, 6022 bp, Kochia scoparia
atagaagttatggcaatcgcggggtgtttgttttgtgggaatagatgggtgggaatgggaattttaattccaatgtcctaactcccacgtttgtttgtagggaatgagattatttgagagaaggggaatgagattatttggggtcaatttcaatagttttattacatgagaggttggtaacttggtatttgggtgggaattcatatttcttttgtttttttcttttgtttttgctgaaagttatttcttcatctcattttatttccttttttaaaaaaaaaattctcatttatttccaaattaataccaagcaagagattgagataattttatcaattttcacatttcaatttacattctcattttcatttccacttgtcaaatgtcccggcatgacatggaacacgcaacacaccataagctcattagatcatttgtcggagtttcgattttcagcatatacacctattgacctgtcaccatccatggtaaaatgttgatatgtgggctaagccacatcacgtaatgtcgtaatctgcttttaaaagcacattaagttacataattttcaacacgcgcattgctatcaacttgcattgttccacttgtatatcattgctgaagtattataatcgagcgatctgtttttgcacaatacagaatcggatttgcaacagaaaatagaaacaagtaaaatcaggatcagatgctcaaagcctcatgtcattgtttccatttaaacaaaaaaacatgtcattataattcccatgcccatatatttaggtaaatattcctgctcggatattctacgaaaaatagaaaattaaaggccatataggtctaatgaactagctaaatcgaatctgtagaagatttttaacattttaactttgtaaaatatgaaaataattattcttctaagctttgcacaatagtcgcattttgttgttgtcgtataaaaaaaacattgcatagacaataacttagatttccaacgaattaactactccgtaacttgtattccacgtgcatagaaaatgtagcattttatgtttatttctctatttataagtggggcaaatcttgtaaataactatctatgtattcaataaaaataatcatgtggtgtcttgtttgatttgtattaatgagtagattatcaacatttaattattataatttttacatatctacatttaaagatataaacattataagacatgtattgagaaacatataaatagtaaatgactgcgttttcacggaacaaaatgaataccttatataaaatgtaattatttgttcatttatttttaattttgtcactgtatgacatttttagttatttttttattttattattatattttattttatactttcaccgtttttaaaatttttaaaaaagtaattttttatctctcacaaaaaatgtcccttgtcgcaagtttttgaaaacaaaagaagtaataaaactcaattatggattgagagctacatataacatatataagaaaatgaatgtatgactcaacatactcaataaataaattggattttgcgatcaagtttgtgggctttatcctttcaattaaaatgtatacttgatgcaacacaatctaatgagtaatgacatctttgatatgaagtgtatcaaatatctaaataaattatttcaaaaatggagaacaaatattaaccacgaaatgagtagtagaaaaaaggaaacaccttttttatttgcattattattattactttatgtaggaaaactccatttggagtcttgacaaaaacaaatgaatgaaaaaagactttttggttttggtaatttaagctaaaaagaaaaagaaaaaagaaaaaagaaaaaggagaaaaccagagttgagcgcctccactagttgttttcctttccttcctcggaagaaccctatttcttcctccctcatatgatatccttccttcaaactccacactcctctctttcattttctctctgatcataccttcaaccttcaacaatggcgtctacttctgcaaatcccacttttacccctttcaccagtaaaccccttaaaccccgttctccctttcactctttcccatttccctcaaaccccaaaaccccttcctcttcatttcgcaacctcaaaatcacatcttctctctcttcttcacaacccccgaaaccaccttccgccgtcaaaacccactcaccaccttcccctctcacaaccgacgaacccccgcaaggttttgtttcccgatttgcccctgaccaacccagaaaaggctgcgatgtcctcgttgaggccctcgagcgggagggcgtcaccgacgtgttcgcttatcctggtggcgcatcaatggagattcatcaagctctgactcgctctgattccatacgcaacgtcctgcctcgccacgagcaaggcgggatctttgccgcggaggggtatgctcgtgccacgggccgtgttggtgtctgcattgcgacatctggccctggcgctacgaacctcgtgtccgggtttgctgatgctttgctcgattccgttccactggtggcgatcacggggcaggtgccgcggcgaatgattgggacggatgcttttcaggagactcctattgttgaggtaacacggtctattaccaagcataattatctggtattagatgttgaggatattcctagaattgttaaggaggctttctttttggctaattctggtagacctggacctgttttgattgatattcctaaggatattcagcagcaattggttgtgcctgattgggatcagggggttaggttaggtgggtatgtgtctaggttgccgaaatcggtgttttcggccaatgatgaggggcttcttgagcagattgtgaggttgatgagtgaggctaagaagcctgtgttgtatgtgggaggcgggtgtttgaattctggggaggagttgaggaaattcgtcgagttgactgggattccggtggctagtactttaatgggtttgggcgcttatccctgtaatgatgacttgtctcttcatatgttgggtatgcacgggaccgtgtatgctaattatgctgttgataaggcagatttgttgcttgcctttggggttaggtttgatgatcgtgtgacagggaagcttgaggcgtttgctagccgggctaagatcgtgcatattgatattgattctgctgagattgggaagaataagcaaccccatgtgtcaatatgtgctgatgtcaagtatgcgttgaagggtatgaataagattttggagtctaggaaagggaagttgaatttgaattactctagctggagggaggaattgggtgagcaaaagaagaaattcccattgtcttttaagaccttcggggaagcgattcctcctcagtatgccattcagatgcttgatgagctgaccaatggtaacgctattattagtactggtgttgggcaacatcaaatgtgggctgctcagcattacaagtacagaaaccctcgccaatggctgacctcaggtgggttgggtgccatgggttttggtctaccagccgccattggagctgctgtggctcgacctgatgcagtggtggttgatattgatggcgatgggagtttcattatgaatgttcaagagttggctactattagggtggaaaatctccctgttaagataatgcttttgaataaccaacatttaggtatggtggttcaatgggaagataggttttataaagccaatagggcacatacttaccttggaaacccttcaaaagagtctgaaatcttcccggatatgcttaaatttgctgaggcgtgtgatattcctgctgctcgtgtcaccaaggttggagatttgagggcggccatgcagacaatgttggatactccgggaccttacctgcttgatgtgattgtacctcatcaggagcatgtgctgcctatgattcctagtggtgcagccttcaaggatatcattaacgaaggtgatggaagaacaagttattgatgttcgtatcgatggttgaaagcatctatagagggggaagcaaaataagaataataatctgtatgtataatagtatgttccttttaaatttttagcgtctgtttacttgtttttttagttttctagttagtttgtcgttgttatgttgcttgttactttgagaatgcttttttgtagttttcaagagacgagtatggatgatcttcctatattgttcaaagatttcaccaagtggtctttggactatgtatgttgtatttgatgtttggttagttatgttaattgtcctaatgcaagcgttgttaaaatcgccatttgacactcattagaccttacttctatatatttgtaagctgcttattggatgattttaaacacctccttgttttgcttgtctaatggacttttgttgctatacataataatgtttaactccaaaacaaccaaaaaaagattctggcacaaccagttctactaccataaaataaggttatgaagtgctttagagataagcacaagcttgggaagatagtagtggctgctcatacttttggttcttctgaaaagaacatatgattgtgaagaaactgcctaaacatttgcatttccttgaggttgaggtttgtagatgattagtgtgaaagccctttgcaggtgttgagaacttgagattgaggtttaggttagagatttggagtggaagttggtaagtacgacttttgccgaaacttcaggagcataacgtgtctcggcaagttaagcaggcaagcatttacaaggaaagggtatttgaacaataggtttatattgatcccaagagtatgctatacatttgtcatgatcgaacaacttgctacttaagagatttgtgtcatgcctttgagttattgagaaaaggagtgagctagatccagaataacttgagggaatttagagacttcattcctatgaatccaaatggcccgtagtatggttaaaaactggctacatttaattcaatctcttttaacaaattaaaggacaaaaatcttgcaaccattgttccagtgaaatattagctgctaggtccgtgcgaattcctagaacaccaagatcgaaaagttcataaaccctaaatcctggcttccttaaattagttttaactgctgaagcatggcatagaacttcatcttcttgtaaatacttcctcggtttgttttagatgttatatttatttgggcctaaactttggaccaaaattagaaaattttaattagaagatgtaattagggaaatgatgaattaattaaacaactaaccaacctaatctctaccactaaacaacctaccaaccacagaccacctccaaaccctagccgccatcaccgccgccgtcaccaaaccaccatcgactaccagactcaaatctccaaatagtcgcgaccaccaccaaacccacgccatgaccatcgaccaccaccaaacccttgctgcaaaccacactttgagtcaaccaccgcaacaatttttgagcaatttatgagattttgaactaatttcgaacaacttatgagattttcaaagaatttctcagatttcgaactaattgctttaagattttgaacaatttgacaaatttcaaaccaatttttgagatttcaaatcaatttcctctagctttcgaaccaacttgaggagatttcgaataagttttaagaattcgaatcaatttctttgagctttgaccgatttgtgtgttttgggtggttcaatgggggcactttggtggtctgtgtggtgctgtaaaacattgatgtgcgaatgtgcgattggggtggtgcgattggggtggtgcggtggtgtgtagctgggtggtatgcagatatggtgagccgtggatgtcatgggtggttgttgatgcggtgtattagagatattaattgcttaagatgttaataatatttgattagtttatgtttaattgtgggtacgactgtaaatccacatgtaaaaagttacaa

SEQ ID NO: 42 - DNA, 2514 bp, Kochia scoparia
aaaatggagaacaaatattaaccacgaaatgagtagtagaaaaaaggaaacaccttttttatttgcattattattattactttatgtaggaaaactccatttggagtcttgacaaaaacaaatgaatgaaaaaagactttttggttttggtaatttaagctaaaaagaaaaagaaaaagaaaaaggagaaaaccagagttgagcgcctccactagttgttttcctttccttcctcggaagaaccctatttcttcctccctcatatgatatccttccttcaaactccacactcctctctttcattttctctctgatcataccttcaaccttcaacaatggcgtctacttctgcaaatcccacttttacccctttcaccagtaaaccccttaaaccccgttctccctttcactctttcccatttccctcaaaccccaaaaccccttcctcttcatttcgcaacctcaaaatcacatcttctctctcttcttcacaacccccgaaaccaccttccgccgtcaaaatccactcaccaccttcccctctcacaaccgacgaacccccgcaaggttttgtttcccgatttgcccctgaccaacccagaaaaggctgcgatgtcctcgttgaggccctcgagcgggagggcgtcaccgacgtgttcgcttatcctggtggcgcatcaatggagattcatcaagctctgactcgctctgattccatacgcaacgtcctgcctcgccacgagcaaggcgggatctttgccgcggaggggtatgctcgtgccacgggccgtgttggtgtctgcattgcgacatctggccctggcgctacgaacctcgtgtccgggtttgctgatgctttgctcgattccgttccactggtggcgatcacggggcaggtgccgcggcgaatgattgggacggatgcttttcaggagactcctattgttgaggtaacacggtctattaccaagcataattatctggtattagatgttgaggatattcctagaattgttaaggaggctttctttttggctaattctggtagacctggacctgttttgattgatattcctaaggatattcagcagcaattggttgtgcctgattggggtcagggggttaggttaggtgggtatgtgtctaggttgccgaaatcggagttttcggccaatgatgaggggcttcttgagcagattgtgaggttgatgagtgaggctaagaagcctgtgttgtatgtgggaggcgggtgtttgaattctggggaggagttgaggaaattcgtcgagttgactgggattccggtggctagtactttaatgggtttgggcgcttatccctgtaatgatgacttgtctcttcatatgttgggtatgcatgggaccgtgtatgctaattatgctgttgataaggcagatttgttgcttgcctttggggttaggtttgatgatcgtgtgacagggaagcttgaggcgtttgctagccgggctaagatcgtgcatattgatattgattctgctgagattgggaagaataagcaaccccatgtgtcaatatgtgctgatgtcaagtatgcgttgaagggtatgaataagattttggagtctaggaaagggaagttgaatttgaattactctagctggagggaggaattgggtgagcaaaagaagaaattcccattgtcttttaagaccttcggggaagcgattcctcctcagtatgccattcagatgcttgatgagctgaccaatggtaacgctattattagtactggtgttgggcaacatcaaatgtgggctgctcagcattacaagtacagaaaccctcgccaatggctgacctcaggtgggttgggtgccatgggttttggtctaccagccgccattggagctgctgtggctcgacctgatgcagtggtggttgatattgatggcgatgggagtttcattatgaatgttcaagagttggctactattagggtggaaaatctccctgttaagataatgcttttgaataaccaacatttaggtatggtggttcaatgggaagataggttttataaagccaatagggcacatacttaccttggaaacccttcaaaagagtctgaaatcttcccggatatgcttaaatttgctgaggcgtgtgatattcctgctgctcgtgtcaccaaggttggagatttgagggcggccatgcagacaatgttggatactccgggaccttacctgcttgatgtgattgtacctcatcaggagcatgtgctgcctatgattcctagtggtgcagccttcaaggatatcattaacgaaggtgatggaagaacaagttattgatgttcgtatcgatggttgaaagcatctatagagggggaagcaaaataagaataataatctgtatgtataatagtatgttccttttaaatttttagcgtctgtttacttgtttttttagttttctagttagtttgtcgttgttatgttgcttgttactttgagaatgcttttttgtagt

SEQ ID NO: 43 - DNA, 2152 bp, Lolium multiflorum
gccgccgccgccgccatggcaactgccacttcgacagccgtcgccttctcgggagccaccgccaccttgcccaaaccacgcactctcccgcgtcaccaactgccctcctcacgccgcgccctcgccgcccccatcaggtgctccgcggtgtccccatcgccctcgcccgcccctcccgccaccgcgctccgcccatggggcccatccgagccccgcaagggcgccgacatcctcgtcgaggccctcgagcgctgcggcatcagcgacgtcttcgcctacccgggcggcgcctcaatggagatccaccaggcgctcacgcgctcgccgctcatcaccaaccacctcttccgccacgagcagggcgaggccttcgcggcgtccgggtacgcgcgggcgtccggccgcgtcggggtctgcgtcgccacctccggcccgggggccaccaacctcgtctccgcgctcgccgacgccctcctcgactccatccccatggtggccatcacggggcaggtcccgcgccgcatgatcggcacggacgccttccaggagacgcccatcgtcgaggtcacccgctccatcaccaagcacaactacctcgtcctcgacgtcgaggacatcccccgcgtcatccaggaagccttcttcctcgcctcctctggccgcccgggcccggtgctcgtcgacatccccaaggacatccagcagcagatggctgtgcccgtctgggacgcgcccatgagtctgccaggctacattgcccgcctgcctaagccgccggctactgaattgctcgagcaggtcctgcgtctggttggcgaggcgagacgcccgattctctatgttggcggtggctgctctgcgtccggggaggagctgcgccgctttgttgagctcactgggatccctgttacaactaccctcatgggtcttggcaacttccccagcgacgacccgctgtctctgcgtatgcttgggatgcatggcactgtgtacgcaaactacgccgtagataaggctgacctgttgcttgcatttggcgtgaggtttgatgatcgcgtgactgggaaaatcgaggcttttgcaagcaggtccaagattgtgcacattgacattgatccagctgagattggcaagaacaagcagccgcatgtctccatttgcgcagatgtcaagctcgctttgcagggcctgaatgctctgctaactgggagcaaagcacacaagagtttcgattttgcttcgtggcatgacgagttggagcagcagaaaagggagtttcctctgggatacaaaactttcggggaggccatcccaccgcaatatgctatccaggtactggatgagctcaccaaaggtgaggccatcattgccactggtgttgggcagcaccagatgtgggcggctcagtattacacctacaagcgcccacggcagtggctgtcttcggctggtctgggggcaatggggtttgggttgccagctgcagctggcgccgctgtggctaacccaggtgtcacagttgttgacattgatggggatggtagcttcctcatgaacattcaggagttggcgctgattcgcattgagaacctcccagttaaggtgatgatattgaacaaccagcatcttggaatggtggtgcagtgggaggacaggttttacaaggccaatcgggcgcatacataccttgggaacccagaaaatgagagtgagatatatccagattttgtgaccattgctaaaggcttcaatgttcctgcagttcgtgtgacaaagaggagtgaagtccgtgcagcgatcaagaagatgcttgagactcctgggccatacttgttggatatcatcgtccctcaccaggagcatgtgctgcctatgatccctagcggtggtgctttcaaggacattatcatggaaggtgatggcaggattgcgtattaatcgcaacttctgcaagagctccacctacaagacctacaagtgcaatatgcctgatcagcatgatgctggtgtatgttatatccatgtgttcgctaatttgcttgtttgatgagcttggtttgctagtcttacctagctctgaaccttctaggttttctagtctgttcttttccgtaggcatatgctgtcataagagatcatgcaagtttcttgt

SEQ ID NO: 44 - DNA, 14102 bp, Lolium multiflorum
  unsure (1)..(14102): unsure at all n locations
ggcccaacactgtctacaggaatagaagcgtgcgtagacatcactaggatttattgaatacattcatgctatattgttgctgcctagtctttcgttcattgcatatttattcagatcaataattttgtggaaatattaatcctcttcattatgaatcaagatttgatatcaatttctgctcatgcttactttatttccaagtgggaaaaattcacgtagttgtaggtcactagatgtttttgggtatccatttggatgagctgcatgtggatctatcagaagcatcgctaggttggttttggtgtctgtctgagaggaggtttgtctcaccttctcctaaacttgataacttgtttgctgcctgtgtggattggaattttatagaaattttggttccgggaaatgtcaatcacattgttctctgactgtttatgtatggtttgggttgctgatgtctgcttcccttctggaacaggctttggttggacctcggatcgagcttatgttagactttgacccaagatatgatgacaaacttatatgtgttgttgcttcaaatgtccttcatttgttattagtggattagggaaaaactttctggtagcaaaccaagttggctatagtgtttattgatttgttagcttgttccatgcctgtctgtatccccttcctcgtttgtggcgcatgagtatttgctgctgtctggaggcaattattatatcaagtatgcaaggtacttaattaatttagtactactctaggtttgtatcaaacctgacacaacgtgtattagttcaacaatgtgtatatgctttcctagggtccttttactgattactacaacagtgtgtgcttgctgtctagatgccaggcataggaagtcaatggttgctttacaccatcttggagtactaatttttcaactagactgaattttctcgcagtagagtaacttcctgatggcaatggtaagtggttgcatatcagagatacgctgctgctagagtaggcgaggtgtgcttcttggaactggctaggtgcgagctcgtgagatgctgttgagcctaaagcaatgatgccttctctggattaggtaagtctttggtctatctcattctcctctttgttattttgagtcaagtacctatgtgatatggaatatatggtatgaattgctctgtgttagggtctaatcaagtcactatgatgttactttatggttaattatgtatgcgttgctttcttttcgagttatgatgtaagtgataagtcatagtcataatgatctccataaaatggaaatattatactccagttatctattttcgaatttattggttgcatgatgttccaggggtagcatctacatgactagcactcttttatttgactttaggccatgctctcatttctcttgcagtagatagaggcacaaatctattacagtctgatgcatatttttctttggaagcatgaatgttttgtgaatcgtgaaactgttattttggccagtccctgattcttgaatggtttttattattggcttgaccagttaagtatgtacttgtgcactaattttcctctgcattgttgtagtcatgcaagatagatggatgagcatacggcggagtcttgttcttggaccggtggtggttggtagctggatgttgtgacgcgttgctagagggagcggtgcacacggggacaagttggtgggttgccatagtgttggtggacaggagagctcctgatcatgcaactacaagaaggggacttgtaggcatatatgcctggaggttgggagctgtttccagccagaaggaccgataatggatgttgctgctgtagggtgggtttacattctgggctagctttatttgcatccctgtgtcgttcttgtatttgtggtttgaaccgtggattacttatgtctccttcaaagaatttcatgtctttgttgtttccgattgaattatattttgtttaattttgtcaaactgttagaaaataaaaacttacaaatgggaagaaaaaatagatcgcaaaaagactaaggccctaaaaaatgtataggttgttaattgattaaggcccgaaaggttaatcagctaacaaagatgaagcccagaagataaatggaccgaacaatggctgcaaaaatacaaaggctcaaaatttaaatggatcggaaaagaccaaggcctagaataaaaagtctggtattaatgggctcggcctatgcaatccaccgaaatggatcgggctgattttggattacgacgattagatttcgtcataattttgccatgttagactagccacgtaggatctgatgtggcatggccaaatctccagtgacgatattggatcgtcatagtggttacgacgatccaatatcatgatagacgactatgacgattcaaagtaaaaggtcatgttggttgatttttgacgctccgtttttgacgatccattttttgtcatagaatcgtcatagatgaaatattatgacgatttagagacgaaaatggagtgtcgtaggtcaacatatttcttgtagtggagagagtcctcagttagttctatctaacttggagaattccgatgacgtcttcaccagcccgacaccaccaaagccggccttcttgccaccactcatctttctttcggtttgtgtcttgttcgtgtgcgggtctcgcgctaggatccgactccaagtaagagcatctccaacaggcgcactaaattttggcgcgctaaacgtcgcttccgccacgctgtaaacatatagcacgcgctgcgctgaaatttgccccaccggatgctctattttgcagcgcgtgttggcgcggtaaaaaagctcctccgtcgggtgcgccaaaaatacaacgcgcgcgggcgcggcaaaatacagcgcgcgcgcagcaaacaactttctacactactatgcattcaacaagatcaaacactcacatataaatcatgaaacaaatgatctactatagttcaaatggacacaaagtgcaacacacatgacatagttcaagaacgacacacaacatgacgtagttcaacaacgacacacaacatatggttcaaatggacacaaagtgcaacacacaatttgcatatcacaaatgcatctcacacttccgcattttccaagtcatcaccttattttgcttcttcttcctcgtcatcttgggttgaaggaggaatagtaggatccatggaggccacgaatcctcccggtggcgctcccgtagtcccatacacaccacgcaccgagcctcccatagtccctttgaagactcctccataacttggttctcccatgccggccatgcctccaaagcctcccatgccggccatgcctcccatgccggccatgcctcccatacttcctccaaatatgggcatgcctcctccaaacatgccggtcgtgggtgtgttcatgttggctaccaacaatctcttcttggccaacacttcgtcgcgagcaaggttgatgtactacttttgcctctcatccatgtgggaagtatccatcaagaaaagcttcctctcctcctccactaggcgtagatgctcctcgttggcttgcctcttctcctccaaatccaacttcctctcctcgttggcggcaagcctctcctccaaagcggctctccgagcttccattgcatccatagcctctttctccaagttccttgccaccttcctatcttcatttgcttgcaaccttgcatttgcaatcctttccatagcaatgacaatgtcatcatctccggccttctttcccttcatatctttggcggtcttcctaccaagcacattcctccgcccattattgaccgagtgacgagtggagcgtctcttcttgccttggtcacttgaatcatcatcatcgatgattgttgcatcaccggttgcattggctgccatagttgccacattcaacttcccgcgggtcttcatcttttcttcattccctagcacttcatagcaacgatgcaaggtgaatggcttgccaagattcttgttgcctttcttgttcttctttcccacatccccaaacaatccttgagccatatagttctacaaagcaagcaaaagagaatatatgagctatatgaactacaacctcgtatccttcacatatgagccatatggtcaacatagtagtagaattgcttaccctatcaatctcatttgtgccacttgggttaatgacatcaacgttggcttgcatgcccgcccatttttggcaatcggtgttgatgccggaccaacgagaccgaagagaacgcatggttcgctcgttcccacttgtgttgttggcgtcgaggtactccttcatcctcatccagtatgtgtatcttgtttgatcggcaccggttgttggatccattccaattgtcaaccatgtattgcaaagcaacttgtcctccgctatggtgtagttcgccgaccgaccgggatggcgaggttcaatcaacccttctccttcctcatcgatatcctcatattcctcccatcccttaatggtttcatcatgcataaacgaagatccaacattcattgcctccatgaaagactcatcatcgactctacattgcaatgaagttcattattctgtggctatgtatgcatctaaactaaaatttggatgaaaagaagtgttttttacctctccggcattttctcatacaccgtatgtgcgccggacggaggcgccagcggcggctggttcgtcggtggaggaggcggcggaggctgcgcgcggcgggtcgcggtcgccttcactttcttcggcggcgcaagggaggcgacgtccgcagctacatacgagcgtttggacgacgacgccttcctcctcggcggctcccgcgccttgccgggggccatcacagtggccagctgcgcaacggcggctgtgtgcagcgtcgcgcgcagcgggacgaagagagcacgggcatcagcggttgtgttgccggcgtcggtgccaccgctagggtttggcgcatggggcggcggcgcgacagaggcggcagcggtgggtggaatggagtatggaggggtcggtggggtgccgacgggaccgtccatcgccgggattgtgtcgacggccgcgcggaggcgagggattgggcggtgcggtggcgaggcgcggggggaagtttcagcgcgggatttgttcgcgtgcgtcgagcgatgacgcgtgctgtagccggcgtccaaagtttagcgcttgggatagggcaaaccggtccgcgtcccaaatttttttttacagcgttgtagcatctgccggaggaccaattttgcgctctcgcgctggaaacgacggtttatatagggcgcaacatatatagcgcgtgttgaagatgctctaagactgctcatagtgggagtaacattgctcgtaacgtcacacatctcaaggtgttttggtgacatggcatgtcaataaattaagaaagagagtgaagtggtaactagctatgttaccnnnacatcacacacctcaaggcaagataagtttacaacatgtaataaataacgcaatgcatgacacaacatataagttactacccactctatgatagagtttggctctggtggttaggtcccttgtggtggaaccagcccacccaggttcaagtcctagatttggtatggatgtttgcatttacctggatttatttcagaatttaatcggcgctatactttcagtggtaggtgatgtgcccgtcaatagcgaggcgccagtggtgacttcgtcaacctcaagatatggtggctcagtccctcgaaggtgctcataggagtagggtatgcgtgcgtgcgttcgtacggtgtttgtacgtgcgtatttgtgagttctcgtctgccttatactgtgttctaaaaaaaattcagtttttatcttgcctcgagagccgacttccaatctggacccgttataggtggaccctacgtgtcaatgccaacacggctttgattcacgcgccgctgcaatcttcattgtatatccttctatataccgacgcaggttgttcaaaaagaaaataccgacgcaggtggtgaacagcctagcaaattgtcaccgacagatgggtccaaaccaggataaggcccacatgtcattgcgtgtagtggcataaccgggttggcccaccccacccccagccccatcccatctgaaccacacatcttgccacgccacgcgactgcaccaaagacaaaacacgctcgcaccaccactccatcctcctctttctccctcgcccaaaccctcgccgccgccttcgcgacatccgccgccgccatggccactgccacttccacagccgtcgccttctcgggtgccaccgccgccttgcccaaaccacgcactctccggcgttaccaactgctctcctcacgccgcgccctcaccgcccccatcaggtgctccgcggtgtccccttcgccttcgcccgcccctcccgccaccgcgctccgtccatggggcccatccgagccccgcaagggcgccgacatcctcgtcgaggccctcgagcgctgcggcatcagcgacgtcttcgcctacccgggcggcgcctcaatggagatccaccaggcgctcacgcgctcgccgctcatcaccaaccacctcttccgccacgagcagggggaggccttcgcggcgtccgggtacgcgcgcgcgtccggccgcgtcggggtctgcgtcgccacctccggcccgggggccaccaacctcgtctccgcgctcgccgacgccctcctcgactccatcccgatggtggccatcacggggcaggtcccgcgccgcatgatcggcacggacgccttccaggagacgcccatcgtcgaggtcacccgctccatcaccaagcacaactacctcgtcctcgatgtcgaggacatcccccgcgtcatccaggaagccttcttcctcgcctcctctggccgcccgggcccggtgctcgtcgacatccccaaggacatccagcagcagatggcggtgcccgtctgggacgcgcccatgagtctgccaggctacattgcgcgcctgcctaagccaccggctactgaactgctcgagcaggttctgcgtctggttggtgaggcaagacgcccaattctctatgttggcggtggctgctctgcatccggagaggagctgcgccgctttgttgagctcactgggatcccagttacaactaccctcatgggtcttggcaacttccccagcgacgacccgctgtctctgcgtatgcttgggatgcatggcactgtctacgcaaactacgccgtagataaggctgacctgttgcttgcgtttggcgtgaggtttgatgatcgcgtcactgggaaaatcgaggcttttgcgagcaggtccaagattgtgcacattgacattgatccagctgagattggcaagaacaagcagccgcatgtctccatttgtgcagatgtcaagctcgctttgcagggcctgaatgctctgctaactgggaccaaagcacaaaagagtttcgattttggttcgtggcatgacgagttggagcagcagaaaagggagtttcctctgggatacaaaactttcggggaggccatcccaccgcaatatgctatccaggtactggatgagctcaccaaaggtgaggccatcattgccactggtgttgggcagcaccagatgtgggcggctcagtattacacctacaagcgcccacggcagtggctgtcttcggctggtctcggggcgatggggtttgggctgccagctgcagctggcgccgctgtggctaacccaggtgtcacagttgttgacattgatggggatggtagcttcctcatgaacattcaggagttggcgctgattcgcattgagaacctcccagttaaggtgatgatattgaacaaccaacatcttggaatggtggtgcagtgggaggacaggttttacaaggccaatcgggcgcatacataccttgggaacccagaaaatgagagtgagatatatccagattttgtgaccattgctaaagggttcaatgttcctgcagttcgggtgacaaagaggagtgaagtccgtgcagcaatcaagaagatgcttgagactcctgggccatacttgttggatatcatcgtccctcaccaggagcatgtgctgcctatgatccctagcggtggtgcttttaaggacattatcatggaaggtgatggcaggattgcgtattaatcggaacttctgcaagagctcgacctacaagacctataagtggaatatgcctgatcagcatgatgctggtgtatgttatatccatgtgttcgctaatttgcttgtttgatgagcttggtttgctagtcttacctagctctgaaccttctaggttttctagtctgttcttttccgtaggcatatgctgtcataagagatcatgcaagtttcttgtcctacatatcaataataagtactttcatggaataattctcagtattttagttccaagtcttctcgccatgtttggttacgtactaagtgcatgtgtaaatgtatgtcgccccgatgggggatcaacgacaagttctggactgggaaatcagactgagtttgggtggaaggagaacatacatatgttcatatcatcgttcctttcgttcagtaaccatcgacccacaagccatcctaactaacagactacgagacacagaatttgaacaatatatgctacttgttcacttgcgtttgaggtacgtgatgaagaatctcttgggaatatgggttttattgtatataaaagaagacaatctttctgtgagatagagaatcttgagaatatcctcatagatttttcaaggatacttttggatatcatgtattacctgtaggcatgcaagtgcctggtgagtatgcttaaaccataacagttttaatttatcatgacagatctccacaaaatagccagaatagttgtgcctaaaataagtaatgttttctttgtggcaagcacagatgaaggtgcccaactttgtttcacttttagcacatatttctcctttattttgtagtcctctatttcttattcttaggtcttaacagatcttttgctaatggtctcttcgattttgagctcctctttctatttcataggataatatcttaggctaatgtaatactggccttgatatgtttgtgcgtgtgtcttctggtcttgcttactcaaaagtattcgtacccacgggtgaatccaggagcgatgttgatgcattcagcttttgcggattgatgttggttagatggatctggatggacctatgttagttttagctctgcatgagtggttaccttatattcccaagcttcatgttcagtggaccttttttttttgaccgaatgttcagtggaccttggtggagactcatgtagcctctgtacattcgttcttggtatgtgaattcttaaatatatttatatatgaatgctaagctccatggtgaagcacgattctgtctttgattacttcttcggtggggctgttgttctctgttaataaaaagtcttcacatgtagcctacctgtaagatattgattggtgttgactgtgcaggagcttagagtttaggaaccaagtgcaaactttatttataaaaccaagaatattaaataaggtatttttttttacaaattagcatccgtatctatctggtgtaacaatcgaagagaggtattgttgtttttgttaagttcatacatttacgtgttacttagattcacgcaaatgtacatactccatctgattgtatcatttatcgtttttgtttggggtcgcgcagctagcaagctgcgccttccttacatctgttgctcttggcataacggtgttggttattgtaatgtattttcctattttcctgattgtataagcatttggtactcctttcatgattttgtttgctcttatcctaatttctctcttatctgcttcgttttgtaaaaatttaaaaacatattattattttcctgcctgctttttattgtcgttatacgaaatgtaaatagtggtgaattccacgggtacaactcttaatctagtatctttacagctgtaagaacattgcaaggattgaatttctctacggaaataaagaatttttgaaattttcagaatttcgggaagtcacatcaatgattttgtcaacctattaatgaaactttcaggagtgtactgtccttcatggtttcagatatttccgaacaagtaaaatatcatgacagcggaaggctcccttgctgtgcgttgccctctgaacttgtaagaaccgtatttagcatcttccttgcaagtgcagcaattgatctccaatagcagcgagttaaccattgacacggcatcagaagtccaaaactcataagtactgtacttttttttttgtagaaatggcatgcatccgagggtggatgatgaattgtacatagcttacattttccttattatgtcatgcagtgccaacattcagagaaggggctctatcatcattacgcaaagctaataactaataagctccatttggtacagatagccaatgatcaagcgtccacgggatgggatctgatttgtgatagcacatgagttgtctcattagaaaattcgccacaactccctagttttccttttcacatcattttagtgtgtgctggtccggtagctccataaacaaagcgatcatggacaccgcaaaaatcacagctaaccacagcttcaaagatcgtgggagcccccactgaatcataattacatctacgctacagcctgaacagggtgtcatatactcgtatcctgctgtttaggcgcagcccaaagaaccaaacatccttcacagctgcaaaaaagagatttgattttactgaaaccatgtctacagagacatgtttatgggttgctgaatgacagatccacttggcatgtttcaaacccttatttatgtatttacaaacaataaaacctcagaactaggccaaaacttctgtgaggaatatatctacagctgtatgtgtttgacatgatctatggttttaagaggttcatggaaacataacaatcattgtgatagctgataactggcagacaaaaaaagggtgaaagaccgatttaacaagttgtgagcagatcgcaggcgagctcaaaagaagtacaagccagctcggggcacatgtaaagaggtctgataggagatgattcagtacgcatcaccgcagacgaactagatttacatgatttaacagtctagtaggagcatttggtacaaagatggaccaccccaaacctggcaccccttgacattcattcaagaactacctacccagaattgataatacccgtcaccgaaatctcttatccttttggaggaggatatttgggttcctcttagatcctgttagctcgccccatctcgtccctggtccatgaacgcgtgaagaaatgctccagagggtgtctccttgctggccagccgcatctttcgttggctttgaaatagctttggatttcatcagaggattcttgttgcctttacccatgccagctcctagcagccatcttgagccagcttgctgctgtgtttgattaccccatggttttgtcttctcaggctcgctcttaaagccagctacatgcacttctgtgactttaaactgaggggcagaatcttcctcctcgatcttttcttcagcaaccaatgccttatctagaatctcctcagtcttgggctcctcataatattcctcactgttacctttctccgaaacagtgttgtatatcttgggctttgggggaataaaaaccctctccacttgaatcagagaaagcatcggtgtgccaactggctcatagttacgtagcgggtcacgcaactgaaccataagagcaactgtgaagttgttccccaacaaaccccatcttctaccagatcttctgcttttcttgtccgcattctggttttcagcaagtaggtccattgatttggcatggtgggcagcaagtattttcgatgtacggtcactgaactgttcctcttcatcgaccactccagaatcaagtctcatccactcatctagagtgattgataatcccattagtccatcaacatcaccaccactttgtttaacatccagaagctgcaatcccgcagtcccttctaacccaagggtccgtgtattctctgcgcattttccttgcagagatgaaatctcaccaacagggtgggcactgatattggagggtgcctcttcttcagacatgccagattgtatcctcagaccctcaatagaaagggcttcaattttttccatagctaatggggcaaggtcctcaagtgaaacatattccgaagcatttatcccacccaatgatgatgacagatcagcacctcttcttttcttcttctttcccaagggagcatcactgacccctcctgctaaagcttccatgctatggttctccaataggtcgtatctgcatttgttagagcaatatgttttagccagggtaaatggttaagtaggaagtcatgagcaagcatgacaagaaagatttctaaccttccagcagactctagagcaggacaagccccccaggcgagctgctgcatcattttgccattcacatcttccaagggcataagtttgtttgcttgcattgatagcttttcgattccaactgaagctagaccgtgcaatatctccataattccagatcccatttctgctggtagcacgattggagaagaagcctgcatgaccaggctacagttgttctttgcattcttgaaaagagctggattcatcgaccgcagaaatcctccatcttctgtctgaataaatgggcccaaaccatcagccaaaggcggcagctcgaggggcagctcaggtggtatgtcaatggggctaccaaacccacttctagttccacgtggggaagattggaaggacttctcatttagcccgaactgacgcatcaaagcttcagcttcctggtcttccagtgacttggctgtaaatgtggcgtctatgggcggagctgcactctgcagctcaagctcagcctcgtgtatgattgtggagagatcaaattcctctgcaaagtcgtcacaactagcttcgtccgctccatcttcgaaatccaaacctagaatacagtccccagattccagagcttctttttcgaattgcttccaaagcttctccctcggcgactctgaatcactgtctgtggttggcccaaatgggctatgctcgatcccaagcatttccaaaaactcgctagcaacaaaatcagacgaagcatccacgctgcgtgatctgctcttcctgctggcggaattgtaaccgtcttccgcgcccatgcagctcattcgcctagacagcttatcgtccacggttggcgaatcaaattcctctggctccacgattgcgaatttgttgaacaaggactccagatcctccagctctgcatcctctgccagctgaccatcttcttccaatgatgaagtagggagcaaggctgcttcgaccggcgcatcctgctcgtctcccacatcgtccgtttcaggagcaacatcgctgggctcctcttgcagcttcacttcaacggtgccgtctttagcaggatcgtcgcttaaaaatgcaggtttggtcgttgcctcttcattagcttccccattaaaattctctgcacggtcagccacatagtcagccttggcaggtttgagctgctctaggtcctggagggcgacctcaactccctgctcaaccacactgaactctgcgctatagcaatcgccatctggatgcgcaaagtccccctcccccttcttcacctccaccgacgtgcaatgctttgactccggcgagccatcctcctcgggttctactgctgccttttttgtggcatcaagacctgcgtcaccagcaaaggccaaggctttggcaggcctggtggtgctgggcagaacctcgtgcagcaccctgacgacgtcccgggtccgtgcaggcacgggcgtgggcgcctgccgcgccacggagccccgcc

SEQ ID NO: 45 - DNA, 206 bp, Lolium multiflorum
gggtgacaaagaggagtgaagtccgtgcagcaatcaagaagatgcttgagacccctgggccatacttgttggatatcatcgtccctcaccaggagcatgtgcttcctatgatccctagcggtggtgcttttaaggacattatcatggaaggtgatggcaggattgcgtattaatcgggacttctgcaagagctccacctacaagac

SEQ ID NO: 46 - DNA, 200 bp, Amaranthus chlorostachys
ataattatttggtgttagatgttgaggatatcctagaattgttaaggaagctttctgttagctaattctggtagacctggacctgttttgattgatatcctaaagatattcagcaacaattagttgttccaattgggaacagcccaattaaattgggtgggtatctttctaggttgcctaaactcacttcaactgctaat

SEQ ID NO: 47 - DNA, 200 bp, Amaranthus chlorostachys
attagcagttgaagtgagtttaggcaacctagaaagatacccacccaatttaattgggctgttcccaattggaacaactaattgttgctgaatatctttaggatatcaatcaaaacaggtccaggtctaccagaattagctaacagaaagcttccttaacaattctaggatatcctcaacatctaacaccaaataattat

SEQ ID NO: 48 - DNA, 200 bp, Amaranthus chlorostachys
gcctaaactcacttcaactgctaattaagagggacttcttgatcaaattgtgaggttggtgggtgaagaaaccattgatgaagatgggcgaagaattcaaatcaatgttgtggttttgaaggttttgttgtgaaggttttttttaagtgccattaatgaagaggtttaaggaagaaaccataatggggaggttgaggaag

SEQ ID NO: 49 - DNA, 200 bp, Amaranthus chlorostachys
cttcctcaacctccccattatggtttcttccttaaacctcttcattaatggcacttaaaaaaaaccttcacaacaaaaccttcaaaaccacaacattgatttgaattcttcgcccatcttcatcaatggtttcttcacccaccaacctcacaatttgatcaagaagtccctcttaattagcagttgaagtgagtttaggc

SEQ ID NO: 50 - DNA, 200 bp, Amaranthus chlorostachys
cgggcacatacatacctcgggaatccttccaattcttccgaaatcttcccggatatgctcaaatttgctgaagcatgtgatataccagcagcccgtgttaccaaggtgagcgatttaaggactgcaattcaaacaatgttggatactccaggaccgtatctgctggatgtaatcgtaccacatcaggagcatgtgctgcc

SEQ ID NO: 51 - DNA, 200 bp, Amaranthus chlorostachys
ggcagcacatgctcctgatgtggtacgattacatccagcagatacggtcctggagtatccaacattgtttgaattgcagtccttaaatcgctcaccttggtaacacgggctgctggtatatcacatgcttcagcaaatttgagcatatccgggaagatttcggaagaattggaaggattcccgaggtatgtatgtgcccg

SEQ ID NO: 52 - DNA, 200 bp, Amaranthus chlorostachys
taccacatcaggagcatgtgctgcctatgatccctagcggtgccgccttcaaggacaccataacagagggtgatggaagaagggcttattagttggttggagatctttatagaggagaagcttttttgtatgtatgttagtagttccataaacttctatattctctggccgttctctcgtttagctgtttttatgttagt

SEQ ID NO: 53 - DNA, 200 bp, Amaranthus chlorostachys
actaacataaaaacagctaaacgagagaacggccagagaatatagaagtttatggaactactaacatacatacaaaaaagcttctcctctataaagatctccaaccaactaataagcccttcttccatcaccctctgttatggtgtccttgaaggcggcaccgctagggatcataggcagcacatgctcctgatgtggta

SEQ ID NO: 54 - DNA, 200 bp, Amaranthus graecizans
ttccttctcagtgattccctttctccattttcgcttagctctcctctcacactaattacctccatttccaaccttccaagctttcaacaatggcgtccacttcttcaaacccaccattttcctcttttactaaacctaacaaaatccctaatcttcaatcctccatttacgctctccctttttccaattctcttaaaccc

SEQ ID NO: 55 - DNA, 200 bp, Amaranthus graecizans
gggtttaagagaattggaaaaagggagagcgtaaatggaggattgaagattagggattttgttaggtttagtaaaagaggaaaatggtgggtttgaagaagtggacgccattgttgaaagcttggaaggttggaaatggaggtaattagtgtgagaggagagctaagcgaaaatggagaaagggaatcactgagaaggaa

SEQ ID NO: 56 - DNA, 200 bp, Amaranthus graecizans
ccctttttccaattctcttaaacccacttcttcttcttcaatcctccgccgccctcttcaaatctcatcatcttcttctcaatcacctaaacctaaacctccttccgctactataattcaatcaccatctctcaccgatgataaaccctcttcttttttttcccgatttagccctgaagaacccagaaaaggttgcgatg

SEQ ID NO: 57 - DNA, 200 bp, Amaranthus graecizans
catcgcaaccttttctgggttcttcagggctaaatcgggaaaaaaaagaagagggtttatcatcggtgagagatggtgattgaattatagtagcggaaggaggtttaggtttaggtgattgagaagaagatgatgagatttgaagagggcggcggaggattgaagaagaagaagtgggtttaagagaattggaaaaaggg

SEQ ID NO: 58 - DNA, 200 bp, Amaranthus graecizans
gaagaacccagaaaaggttgcgatgttcttgttgaagctcttgaacgtgaaggtgttaccgatgtttttgcttaccctggtggagcttccatggaaatccatcaagctcttactcgttctaatatcattagaaatgttcttcctcgacatgaacaaggtgggttttcgctgctgaaggctacgctcgtgctactggacgt

SEQ ID NO: 59 - DNA, 200 bp, Amaranthus graecizans
acgtccagtagcacgagcgtagccttcagcagcgaaaacccaccttgttcatgtcgaggaagaacatttctaatgatattagaacgagtaagagcttgatggatttccatggaagctccaccagggtaagcaaaaacatcggtaacaccttcacgttcaagagcttcaacaagaacatcgcaaccttttctgggttcttc

SEQ ID NO: 60 - DNA, 200 bp, Amaranthus graecizans
aggctacgctcgtgctactggacgtgttggagtttgtattgctacttctggtccaggtgctactaatcttgtctctggtcttgctgatgcccttcttgactcagtcccgcttgtcgccattactgggcaagttcctcggcgtatgatcggtactgatgcttttcaagagactcctattgttgaggtaactcgatcgatta

SEQ ID NO: 61 - DNA, 200 bp, Amaranthus graecizans
taatcgatcgagttacctcaacaataggagtctcttgaaaagcatcagtaccgatcatacgccgaggaacttgcccagtaatggcgacaagcgggactgagtcaagaagggcatcagcaagaccagagacaagattagtagcacctggaccagaagtagcaatacaaactccaacacgtccagtagcacgagcgtagcct

SEQ ID NO: 62 - DNA, 200 bp, Amaranthus graecizans
attgttgaggtaactcgatcgattactaagcataattatctggtgttagatgttgaggatatccctagaattgttaaggaagctttctttttagctaattctggtagacctggacctgttttgattgatattcctaaagatattcagcaacaattggttgttcctaattgggaacagcctattaaattaggtgggtatct

SEQ ID NO: 63 - DNA, 200 bp, Amaranthus graecizans
agatacccacctaatttaataggctgttcccaattaggaacaaccaattgttgctgaatatctttaggaatatcaatcaaaacaggtccaggtctaccagaattagctaaaaagaaagcttccttaacaattctagggatatcctcaacatctaacaccagataattatgcttagtaatcgatcgagttacctcaacaat

SEQ ID NO: 64 - DNA, 200 bp, Amaranthus graecizans
agcctattaaattaggtgggtatctttctaggttgcctaaacccacttattctgctaatgaagaggggcttcttgatcaaattgtgaggttagtgggtgaggctaagagacctgtgctgtatactggaggtgggtgtttgaattctagtgaagaattaaggaaatttgtcgagttgacagggattccggttgctagtact

SEQ ID NO: 65 - DNA, 200 bp, Amaranthus graecizans
agtactagcaaccggaatccctgtcaactcgacaaatttccttaattcttcactagaattcaaacacccacctccagtatacagcacaggtctcttagcctcacccactaacctcacaatttgatcaagaagcccctcttcattagcagaataagtgggtttaggcaacctagaaagatacccacctaatttaataggct

SEQ ID NO: 66 - DNA, 200 bp, Amaranthus graecizans
gacagggattccggttgctagtactttaatggggttgggggctttcccttgtactgatgatttgtcccttcatatgttgggaatgcacgggactgtgtacgcgaattacgcggttgataaggctgatttattgcttgctttcggggttaggtttgatgatcgagtgactgggaagcttgaggcgtttgctagccgggcta

SEQ ID NO: 67 - DNA, 200 bp, Amaranthus graecizans
tagcccggctagcaaacgcctcaagcttcccagtcactcgatcatcaaacctaaccccgaaagcaagcaataaatcagccttatcaaccgcgtaattcgcgtacacagtcccgtgcattcccaacatatgaagggacaaatcatcagtacaagggaaagcccccaaccccattaaagtactagcaaccggaatccctgtc

SEQ ID NO: 68 - DNA, 200 bp, Amaranthus graecizans
cttgaggcgtttgctagccgggctaagattgtgcacatcgatatcgattctgctgaaatcgggaagaataagcaacctcatgtgtcgatttgtggtgatgttaaagtggcattacaggggttgaataagattttggaatctagaaaaggaaaggtgaaattggatttctctaattggagggaggaattgaatgagcagaa

SEQ ID NO: 69 - DNA, 200 bp, Amaranthus graecizans
ttctgctcattcaattcctccctccaattagagaaatccaatttcacctttccttttctagattccaaaatcttattcaacccctgtaatgccactttaacatcaccacaaatcgacacatgaggttgcttattcttcccgatttcagcagaatcgatatcgatgtgcacaatcttagcccggctagcaaacgcctcaag

SEQ ID NO: 70 - DNA, 200 bp, Amaranthus graecizans
ggagggaggaattgaatgagcagaaaaagaagtttcctttgagttttaagactttcggggacgcaattcctccgcaatatgccattcaggtgcttgacgagttgacaaagggtgatgcggttgtaagtaccggtgttgggcagcaccaaatgtgggctgcccaattctataagtaccgaaatcctcgccaatggctgacc

SEQ ID NO: 71 - DNA, 200 bp, Amaranthus graecizans
ggtcagccattggcgaggatttcggtacttatagaattgggcagcccacatttggtgctgcccaacaccggtacttacaaccgcatcaccctttgtcaactcgtcaagcacctgaatggcatattgcggaggaattgcgtccccgaaagtcttaaaactcaaaggaaacttctttttctgctcattcaattcctccctcc

SEQ ID NO: 72 - DNA, 200 bp, Amaranthus graecizans
ccgaaatcctcgccaatggctgacctcgggtggtttgggggctatggggtttggtctaccagccgctattggagctgctgttgctcgaccagatgcggtggttgtagacattgatggggatgggagttttatcatgaatgttcaagaattggctacgattagggtggagaatctcccggttaaaatcatgctcttgaaca

SEQ ID NO: 73 - DNA, 200 bp, Amaranthus graecizans
tgttcaagagcatgattttaaccgggagattctccaccctaatcgtagccaattcttgaacattcatgataaaactcccatccccatcaatgtctacaaccaccgcatctggtcgagcaacagcagctccaatagcggctggtagaccaaaccccatagcccccaaaccacccgaggtcagccattggcgaggatttcgg

SEQ ID NO: 74 - DNA, 200 bp, Amaranthus graecizans
ccggttaaaatcatgctcttgaacaatcaacatttaggtatggttgttcaatgggaagatcgattttacaaagctaaccgggcacatacatacctcgggaatccttctaattcttccgaaatcttcccggatatgctcaaatttgctgaagcatgtgatataccagcagcccgtgttaccaaggtgagcgatttaagggc

SEQ ID NO: 75 - DNA, 200 bp, Amaranthus graecizans
gcccttaaatcgctcaccttggtaacacgggctgctggtatatcacatgcttcagcaaatttgagcatatccgggaagatttcggaagaattagaaggattcccgaggtatgtatgtgcccggttagctttgtaaaatcgatcttcccattgaacaaccatacctaaatgttgattgttcaagagcatgattttaaccgg

SEQ ID NO: 76 - DNA, 200 bp, Amaranthus graecizans
ttaccaaggtgagcgatttaagggctgcaattcaaacaatgttggatactccaggaccatatctgctggatgtaatcgtaccacatcaggagcatgtgctgcctatgatccctagcggcgccgccttcaaggacaccatcacagagggtgatggaagaagggcttattagttggttggagatctttatagaggagaagct

SEQ ID NO: 77 - DNA, 200 bp, Amaranthus graecizans
agcttctcctctataaagatctccaaccaactaataagcccttcttccatcaccctctgtgatggtgtccttgaaggcggcgccgctagggatcataggcagcacatgctcctgatgtggtacgattacatccagcagatatggtcctggagtatccaacattgtttgaattgcagcccttaaatcgctcaccttggtaa

SEQ ID NO: 78 - DNA, 200 bp, Amaranthus hybridus
ttaccttcatttccaacctttcaagctttcaacaatggcgtccacttcttcaaacccaccattttcctcttttactaaacctaacaaaatccctaatctgcaatcatccatttacgctatccctttttccaattctcttaaacccacttcttcttcttcaatcctccgccgccctcttcaaatctcatcatcttcttctc

SEQ ID NO: 79 - DNA, 200 bp, Amaranthus hybridus
gagaagaagatgatgagatttgaagagggcggcggaggattgaagaagaagaagtgggtttaagagaattggaaaaagggatagcgtaaatggatgattgcagattagggattttgttaggtttagtaaaagaggaaaatggtgggtttgaagaagtggacgccattgttgaaagcttgaaaggttggaaatgaaggtaa

SEQ ID NO: 80 - DNA, 200 bp, Amaranthus hybridus
cttcaaatctcatcatcttcttctcaatcacctaaacctaaacctccttccgctactataactcaatcaccttcgtctctcaccgatgataaaccctcttcttttgtttcccgatttagccctgaagaacccagaaaaggttgcgatgttctcgttgaagctcttgaacgtgaaggtgttaccgatgtttttgcttaccc

SEQ ID NO: 81 - DNA, 200 bp, Amaranthus hybridus
gggtaagcaaaaacatcggtaacaccttcacgttcaagagcttcaacgagaacatcgcaaccttttctgggttcttcagggctaaatcgggaaacaaaagaagagggtttatcatcggtgagagacgaaggtgattgagttatagtagcggaaggaggtttaggtttaggtgattgagaagaagatgatgagatttgaag

SEQ ID NO: 82 - DNA, 200 bp, Amaranthus hybridus
gtgttaccgatgtttttgcttaccctggtggagcatccatggaaattcatcaagctcttactcgttctaatatcattagaaatgttcttcctcgacatgaacaaggtggggttttcgctgctgaaggctacgctcgtgctactggacgcgttggagtttgtattgccacttctggtccaggtgctactaatcttgtttct

SEQ ID NO: 83 - DNA, 200 bp, Amaranthus hybridus
agaaacaagattagtagcacctggaccagaagtggcaatacaaactccaacgcgtccagtagcacgagcgtagccttcagcagcgaaaaccccaccttgttcatgtcgaggaagaacatttctaatgatattagaacgagtaagagcttgatgaatttccatggatgctccaccagggtaagcaaaaacatcggtaacac

SEQ ID NO: 84 - DNA, 200 bp, Amaranthus hybridus
tccaggtgctactaatcttgtttctggtcttgctgatgcacttcttgactcagtccctcttgtcgccattactgggcaagttccccggcgtatgattggtactgatgcttttcaagagactccaattgttgaggtaactcgatccattaccaagcataattatttggtgttagatgttgaggatattcctagaattgtta

SEQ ID NO: 85 - DNA, 200 bp, Amaranthus hybridus
taacaattctaggaatatcctcaacatctaacaccaaataattatgcttggtaatggatcgagttacctcaacaattggagtctcttgaaaagcatcagtaccaatcatacgccggggaacttgcccagtaatggcgacaagagggactgagtcaagaagtgcatcagcaagaccagaaacaagattagtagcacctgga

SEQ ID NO: 86 - DNA, 200 bp, Amaranthus hybridus
gttgaggatattcctagaattgttaaggaagctttctttttagctaattctggtagacctggacctgttttgattgatattcctaaagatattcagcaacaattagttgttcctaattgggaacagcccattaaattgggtgggtatctttctaggttgcctaaacccacttattctgctaatgaagagggacttcttga

SEQ ID NO: 87 - DNA, 200 bp, Amaranthus hybridus
tcaagaagtccctcttcattagcagaataagtgggtttaggcaacctagaaagatacccacccaatttaatgggctgttcccaattaggaacaactaattgttgctgaatatctttaggaatatcaatcaaaacaggtccaggtctaccagaattagctaaaaagaaagcttccttaacaattctaggaatatcctcaac

SEQ ID NO: 88 - DNA, 200 bp, Amaranthus hybridus
ctgctaatgaagagggacttcttgatcaaattgtaaggttagtgggtgagtctaagagacctgtgctgtatactggaggtgggtgtttgaattctagtgaagaattgaggaaatttgtcgaattgacaggtattccggtggctagtactttaatggggttgggggctttcccttgtactgatgatttatctcttcatatg

SEQ ID NO: 89 - DNA, 200 bp, Amaranthus hybridus
catatgaagagataaatcatcagtacaagggaaagcccccaaccccattaaagtactagccaccggaatacctgtcaattcgacaaatttcctcaattcttcactagaattcaaacacccacctccagtatacagcacaggtctcttagactcacccactaaccttacaatttgatcaagaagtccctcttcattagcag

SEQ ID NO: 90 - DNA, 200 bp, Amaranthus hybridus
tactgatgatttatctcttcatatgttgggaatgcacgggactgtgtacgcgaattacgcggttgataaggccgatttgttgcttgcttttggggttaggtttgatgatcgagtgactggtaagctcgaggcgtttgctagccgggctaagattgtgcacatcgatatcgattctgctgaaatcgggaagaataagcaac

SEQ ID NO: 91 - DNA, 200 bp, Amaranthus hybridus
gttgcttattcttcccgatttcagcagaatcgatatcgatgtgcacaatcttagcccggctagcaaacgcctcgagcttaccagtcactcgatcatcaaacctaaccccaaaagcaagcaacaaatcggccttatcaaccgcgtaattcgcgtacacagtcccgtgcattcccaacatatgaagagataaatcatcagta

SEQ ID NO: 92 - DNA, 200 bp, Amaranthus hybridus
gctgaaatcgggaagaataagcaacctcatgtgtcgatttgtggtgatgttaaagtggcattacaggggttgaataagattttggaatctagaaaaggaaaggtgaaattggatttctctaattggagggaggagttgaatgagcagaaaaagaagtttcctttgagttttaagactttcggggatgcaattcctccgca

SEQ ID NO: 93 - DNA, 200 bp, Amaranthus hybridus
tgcggaggaattgcatccccgaaagtcttaaaactcaaaggaaacttctttttctgctcattcaactcctccctccaattagagaaatccaatttcacctttccttttctagattccaaaatcttattcaacccctgtaatgccactttaacatcaccacaaatcgacacatgaggttgcttattcttcccgatttcagc

SEQ ID NO: 94 - DNA, 200 bp, Amaranthus hybridus
ctttcggggatgcaattcctccgcaatacgccattcaggttcttgacgagttgacgaagggcgatgcggttgtaagtactggtgttgggcagcaccaaatgtgggctgcccaattctataagtaccgaaatcctcgccaatggctgacctcgggtggtttgggggctatggggtttggtctaccagctgctattggagct

SEQ ID NO: 95 - DNA, 200 bp, Amaranthus hybridus
agctccaatagcagctggtagaccaaaccccatagcccccaaaccacccgaggtcagccattggcgaggatttcggtacttatagaattgggcagcccacatttggtgctgcccaacaccagtacttacaaccgcatcgcccttcgtcaactcgtcaagaacctgaatggcgtattgcggaggaattgcatccccgaaag

SEQ ID NO: 96 - DNA, 200 bp, Amaranthus hybridus
tggtctaccagctgctattggagctgctgttgctcgaccagatgcggtggttgtagacattgatggggatgggagttttatcatgaatgttcaagagttggctacgattagggtagagaatctcccggttaaaatcatgctcttgaacaatcaacatttaggtatggttgttcaatgggaagatcgattttacaaagcta

SEQ ID NO: 97 - DNA, 200 bp, Amaranthus hybridus
tagctttgtaaaatcgatcttcccattgaacaaccatacctaaatgttgattgttcaagagcatgattttaaccgggagattctctaccctaatcgtagccaactcttgaacattcatgataaaactcccatccccatcaatgtctacaaccaccgcatctggtcgagcaacagcagctccaatagcagctggtagacca

SEQ ID NO: 98 - DNA, 200 bp, Amaranthus hybridus
tgggaagatcgattttacaaagctaaccgggcacatacatacctcgggaatccttccaattcttccgaaatcttcccggatatgctcaaatttgctgaagcatgtgatataccagcagcccgtgttaccaaggtgagcgatttaagggctgcaattcaaacaatgttggatactccaggaccgtatctgctggatgtaat

SEQ ID NO: 99 - DNA, 200 bp, Amaranthus hybridus
attacatccagcagatacggtcctggagtatccaacattgtttgaattgcagcccttaaatcgctcaccttggtaacacgggctgctggtatatcacatgcttcagcaaatttgagcatatccgggaagatttcggaagaattggaaggattcccgaggtatgtatgtgcccggttagctttgtaaaatcgatcttccca

SEQ ID NO: 100 - DNA, 200 bp, Amaranthus hybridus
caggaccgtatctgctggatgtaatcgtaccacatcaggagcatgtgctgcctatgatccctagcggtgccgccttcaaggacaccataacagagggtgatggaagaagggcttattagttggttggagatctttatagaggagaagcttttttgtatgtatgttagtagttccataaacttctatattctctggccgtt

SEQ ID NO: 101 - DNA, 200 bp, Amaranthus hybridus
aacggccagagaatatagaagtttatggaactactaacatacatacaaaaaagcttctcctctataaagatctccaaccaactaataagcccttcttccatcaccctctgttatggtgtccttgaaggcggcaccgctagggatcataggcagcacatgctcctgatgtggtacgattacatccagcagatacggtcctg

SEQ ID NO: 102 - DNA, 200 bp, Amaranthus lividus
cgcctccactctgggtgattccctttctccattctcgcttagctttcctctcacacaaattacctttatttccaacctttcaagctttcaacaatggcgtccacttcttcaaacccaccattttcctcttttactaaacctaacaaaatccctaatctgcaatcatccatttacgctatccctttttccaattctcttaa

SEQ ID NO: 103 - DNA, 200 bp, Amaranthus lividus
ttaagagaattggaaaaagggatagcgtaaatggatgattgcagattagggattttgttaggtttagtaaaagaggaaaatggtgggtttgaagaagtggacgccattgttgaaagcttgaaaggttggaaataaaggtaatttgtgtgagaggaaagctaagcgagaatggagaaagggaatcacccagagtggaggcg

SEQ ID NO: 104 - DNA, 200 bp, Amaranthus lividus
ctatccctttttccaattctcttaaacccacttcttcttcttcaatcctccgccgccctcttcaaatctcatcatcttcttctcaatcacctaaacctaaacctccttccgctactataactcaatcaccttcgtctctcaccgatgataaaccctcttcttttgtttcccgatttagccctgaagaacccagaaaaggt

SEQ ID NO: 105 - DNA, 200 bp, Amaranthus lividus
accttttctgggttcttcagggctaaatcgggaaacaaaagaagagggtttatcatcggtgagagacgaaggtgattgagttatagtagcggaaggaggtttaggtttaggtgattgagaagaagatgatgagatttgaagagggcggcggaggattgaagaagaagaagtgggtttaagagaattggaaaaagggatag

SEQ ID NO: 106 - DNA, 200 bp, Amaranthus lividus
tagccctgaagaacccagaaaaggtagcgatgttctcgttgaagctcttgaacgtgaaggtgttaccgatgtttttgcttaccctggtggagcatccatggaaattcatcaagctcttactcgttctaatatcattagaaatgttcttcctcgacatgaacaaggtggggttttcgctgctgaaggctacgctcgtgcta

SEQ ID NO: 107 - DNA, 200 bp, Amaranthus lividus
tagcacgagcgtagccttcagcagcgaaaaccccaccttgttcatgtcgaggaagaacatttctaatgatattagaacgagtaagagcttgatgaatttccatggatgctccaccagggtaagcaaaaacatcggtaacaccttcacgttcaagagcttcaacgagaacatcgctaccttttctgggttcttcagggcta

SEQ ID NO: 108 - DNA, 200 bp, Amaranthus lividus
gctgctgaaggctacgctcgtgctactggacgcgttggagtttgtattgccacttctggtccaggtgctactaatcttgtttctggtcttgctgatgcacttcttgactcagtccctcttgtcgccattactgggcaagttccccggcgtatgattggtactgatgcttttcaagagactccaattgttgaggtaactcg

SEQ ID NO: 109 - DNA, 200 bp, Amaranthus lividus
cgagttacctcaacaattggagtctcttgaaaagcatcagtaccaatcatacgccggggaacttgcccagtaatggcgacaagagggactgagtcaagaagtgcatcagcaagaccagaaacaagattagtagcacctggaccagaagtggcaatacaaactccaacgcgtccagtagcacgagcgtagccttcagcagc

SEQ ID NO: 110 - DNA, 200 bp, Amaranthus lividus
agactccaattgttgaggtaactcgatccattaccaagcataattatttggtgttagatgttgaggatattcctagaattgttaaggaagctttctttttagctaattctggtagacctggacctgttttgattgatattcctaaagatattcagcaacaattagttgttcctaattgggaacagcccattaaattgggt

SEQ ID NO: 111 - DNA, 200 bp, Amaranthus lividus
acccaatttaatgggctgttcccaattaggaacaactaattgttgctgaatatctttaggaatatcaatcaaaacaggtccaggtctaccagaattagctaaaaagaaagcttccttaacaattctaggaatatcctcaacatctaacaccaaataattatgcttggtaatggatcgagttacctcaacaattggagtct

SEQ ID NO: 112 - DNA, 200 bp, Amaranthus lividus
ttgggaacagcccattaaattgggtgggtatctttctaggttgcctaaacccacttattctgctaatgaagagggacttcttgatcaaattgtaaggttagtgggtgagtctaagagacctgtgctgtatactggaggtgggtgtttgaattctagtgaagaattgaggaaatttgtcgaattgacaggtattccggtgg

SEQ ID NO: 113 - DNA, 200 bp, Amaranthus lividus
ccaccggaatacctgtcaattcgacaaatttcctcaattcttcactagaattcaaacacccacctccagtatacagcacaggtctcttagactcacccactaaccttacaatttgatcaagaagtccctcttcattagcagaataagtgggtttaggcaacctagaaagatacccacccaatttaatgggctgttcccaa

SEQ ID NO: 114 - DNA, 200 bp, Amaranthus lividus
gtcgaattgacaggtattccggtggctagtactttaatggggttgggggctttcccttgtactgatgatttatctcttcatatgttgggaatgcacgggactgtgtacgcgaattacgcggttgataaggccgatttgttgcttgcttttggggttaggtttgatgatcgagtgactggtaagctcgaggcgtttgctag

SEQ ID NO: 115 - DNA, 200 bp, Amaranthus lividus
ctagcaaacgcctcgagcttaccagtcactcgatcatcaaacctaaccccaaaagcaagcaacaaatcggccttatcaaccgcgtaattcgcgtacacagtcccgtgcattcccaacatatgaagagataaatcatcagtacaagggaaagcccccaaccccattaaagtactagccaccggaatacctgtcaattcgac

SEQ ID NO: 116 - DNA, 200 bp, Amaranthus lividus
ctggtaagctcgaggcgtttgctagccgggctaagattgtgcacatcgatatcgattctgctgaaatcgggaagaataagcaacctcatgtgtcgatttgtggtgatgttaaagtggcattacaggggttgaataagattttggaatctagaaaaggaaaggtgaaattggatttctctaattggagggaggagttgaat

SEQ ID NO: 117 - DNA, 200 bp, Amaranthus lividus
attcaactcctccctccaattagagaaatccaatttcacctttccttttctagattccaaaatcttattcaacccctgtaatgccactttaacatcaccacaaatcgacacatgaggttgcttattcttcccgatttcagcagaatcgatatcgatgtgcacaatcttagcccggctagcaaacgcctcgagcttaccag

SEQ ID NO: 118 - DNA, 200 bp, Amaranthus lividus
ctctaattggagggaggagttgaatgagcagaaaaagaagtttcctttgagttttaagactttcggggatgctattcctccgcaatacgccattcaggttcttgacgagttgacgaagggcgatgcggttgtaagtactggtgttgggcagcaccaaatgtgggctgcccaattctataagtaccgaaatcctcgccaat

SEQ ID NO: 119 - DNA, 200 bp, Amaranthus lividus
attggcgaggatttcggtacttatagaattgggcagcccacatttggtgctgcccaacaccagtacttacaaccgcatcgcccttcgtcaactcgtcaagaacctgaatggcgtattgcggaggaatagcatccccgaaagtcttaaaactcaaaggaaacttctttttctgctcattcaactcctccctccaattagag

SEQ ID NO: 120 - DNA, 200 bp, Amaranthus lividus
tataagtaccgaaatcctcgccaatggctgacctcgggtggtttgggggctatggggtttggtctaccagctgctattggagctgctgttgctcgaccagatgcggtggttgtagacattgatggggatgggagttttatcatgaatgttcaagagttggctacgattagggtagagaatctcccggttaaaatcatgct

SEQ ID NO: 121 - DNA, 200 bp, Amaranthus lividus
agcatgattttaaccgggagattctctaccctaatcgtagccaactcttgaacattcatgataaaactcccatccccatcaatgtctacaaccaccgcatctggtcgagcaacagcagctccaatagcagctggtagaccaaaccccatagcccccaaaccacccgaggtcagccattggcgaggatttcggtacttata

SEQ ID NO: 122 - DNA, 200 bp, Amaranthus lividus
agaatctcccggttaaaatcatgctcttgaacaatcaacatttaggtatggttgttcaatgggaagatcgattttacaaagctaaccgggcacatacatacctcgggaatccttccaattcttccgaaatcttcccggatatgctcaaatttgctgaagcatgtgatataccagcagcccgtgttaccaaggtgagcgat

SEQ ID NO: 123 - DNA, 200 bp, Amaranthus lividus
atcgctcaccttggtaacacgggctgctggtatatcacatgcttcagcaaatttgagcatatccgggaagatttcggaagaattggaaggattcccgaggtatgtatgtgcccggttagctttgtaaaatcgatcttcccattgaacaaccatacctaaatgttgattgttcaagagcatgattttaaccgggagattct

SEQ ID NO: 124 - DNA, 200 bp, Amaranthus lividus
agcccgtgttaccaaggtgagcgatttaagggctgcaattcaaacaatgttggatactccaggaccgtatctgctggatgtaatcgtaccacatcaggagcatgtgctgcctatgatccctagcggtgccgccttcaaggacaccataacagagggtgatggaagaagggcttattagttggttggagatctttatagag

SEQ ID NO: 125 - DNA, 200 bp, Amaranthus lividus
ctctataaagatctccaaccaactaataagcccttcttccatcaccctctgttatggtgtccttgaaggcggcaccgctagggatcataggcagcacatgctcctgatgtggtacgattacatccagcagatacggtcctggagtatccaacattgtttgaattgcagcccttaaatcgctcaccttggtaacacgggct

SEQ ID NO: 126 - DNA, 200 bp, Amaranthus palmeri
tccctttctccattttcgcttagctttcctctcacacaaattacctccatttccaaccctccaagctttcaacaatggcgtccacttcaacaaacccaccattttcctcttttactaaacctaacaaaatccctaatctgcaatcatccatttacgctatccctttttccaattctcttaaacccacttcttcttcttca

SEQ ID NO: 127 - DNA, 200 bp, Amaranthus palmeri
tgaagaagaagaagtgggtttaagagaattggaaaaagggatagcgtaaatggatgattgcagattagggattttgttaggtttagtaaaagaggaaaatggtgggtttgttgaagtggacgccattgttgaaagcttggagggttggaaatggaggtaatttgtgtgagaggaaagctaagcgaaaatggagaaaggga

SEQ ID NO: 128 - DNA, 200 bp, Amaranthus palmeri
tcttaaacccacttcttcttcttcaatcctccgccgccctcttcaaatctcatcatcttcttctcaatcacctaaacctaaacctccttccgctactataactcaatcaccttcatctctcaccgatgataaaccctcttcttttgtttcccgatttagccctgaagaacccagaaaaggttgcgatgttctcgttgaag

SEQ ID NO: 129 - DNA, 200 bp, Amaranthus palmeri
cttcaacgagaacatcgcaaccttttctgggttcttcagggctaaatcgggaaacaaaagaagagggtttatcatcggtgagagatgaaggtgattgagttatagtagcggaaggaggtttaggtttaggtgattgagaagaagatgatgagatttgaagagggcggcggaggattgaagaagaagaagtgggtttaaga

SEQ ID NO: 130 - DNA, 200 bp, Amaranthus palmeri
aaaggttgcgatgttctcgttgaagctcttgaacgtgaaggtgttaccgatgtttttgcttaccctggtggagcatccatggaaatccatcaagctcttactcgttctaatatcattagaaatgttcttcctcgacatgaacaaggtggggttttcgctgctgaaggctacgctcgtgctactggacgcgttggagtttg

SEQ ID NO: 131 - DNA, 200 bp, Amaranthus palmeri
caaactccaacgcgtccagtagcacgagcgtagccttcagcagcgaaaaccccaccttgttcatgtcgaggaagaacatttctaatgatattagaacgagtaagagcttgatggatttccatggatgctccaccagggtaagcaaaaacatcggtaacaccttcacgttcaagagcttcaacgagaacatcgcaaccttt

SEQ ID NO: 132 - DNA, 200 bp, Amaranthus palmeri
gtgctactggacgcgttggagtttgtattgccacttctggtccaggtgctactaatcttgtttctggtcttgctgatgcacttcttgactcagtcccgcttgtcgccattactgggcaagttccccggcgtatgattggtactgatgctttccaagagactccaattgttgaggtaactcgatccattactaagcataat

SEQ ID NO: 133 - DNA, 200 bp, Amaranthus palmeri
attatgcttagtaatggatcgagttacctcaacaattggagtctcttggaaagcatcagtaccaatcatacgccggggaacttgcccagtaatggcgacaagcgggactgagtcaagaagtgcatcagcaagaccagaaacaagattagtagcacctggaccagaagtggcaatacaaactccaacgcgtccagtagcac

SEQ ID NO: 134 - DNA, 200 bp, Amaranthus palmeri
aactcgatccattactaagcataattatttggtgttagatgttgaggatattcctagaattgttaaggaagctttctttttagctaattctggtagacctggacctgttttgattgatattcctaaagatattcagcaacaattagttgttcctaattgggaacagcccattaaattgggtgggtatctttctaggttgc

SEQ ID NO: 135 - DNA, 200 bp, Amaranthus palmeri
gcaacctagaaagatacccacccaatttaatgggctgttcccaattaggaacaactaattgttgctgaatatctttaggaatatcaatcaaaacaggtccaggtctaccagaattagctaaaaagaaagcttccttaacaattctaggaatatcctcaacatctaacaccaaataattatgcttagtaatggatcgagtt

SEQ ID NO: 136 - DNA, 200 bp, Amaranthus palmeri
ttgggtgggtatctttctaggttgcctaaacccacttattctgctaatgaagagggacttcttgatcaaattgtaaggttagtgggtgagtctaagagacctgtgctgtatactggaggtgggtgtttgaattctagtgaagaattgaggaaatttgtcgaattgacagggattccggtggctagtactttaatggggtt

SEQ ID NO: 137 - DNA, 200 bp, Amaranthus palmeri
aaccccattaaagtactagccaccggaatccctgtcaattcgacaaatttcctcaattcttcactagaattcaaacacccacctccagtatacagcacaggtctcttagactcacccactaaccttacaatttgatcaagaagtccctcttcattagcagaataagtgggtttaggcaacctagaaagatacccacccaa

SEQ ID NO: 138 - DNA, 200 bp, Amaranthus palmeri
cggtggctagtactttaatggggttgggggctttcccttgtactgatgatttatcacttcatatgttgggaatgcacgggactgtgtatgcgaattacgcggttgataaggccgatttgttgcttgctttcggggttaggtttgatgatcgagtgactggtaagctcgaggcgtttgctagccgggctaagattgtgcac

SEQ ID NO: 139 - DNA, 200 bp, Amaranthus palmeri
gtgcacaatcttagcccggctagcaaacgcctcgagcttaccagtcactcgatcatcaaacctaaccccgaaagcaagcaacaaatcggccttatcaaccgcgtaattcgcatacacagtcccgtgcattcccaacatatgaagtgataaatcatcagtacaagggaaagcccccaaccccattaaagtactagccaccg

SEQ ID NO: 140 - DNA, 200 bp, Amaranthus palmeri
tgctagccgggctaagattgtgcacatcgatatcgattctgctgaaatcgggaagaataagcaacctcatgtgtcgatttgtggtgatgttaaagtggcattacaggggttgaataagattttggaatctagaaaaggaaaggtgaaattggatttctctaattggagggaggagttgaatgagcagaaaaagaagtttc

SEQ ID NO: 141 - DNA, 200 bp, Amaranthus palmeri
gaaacttctttttctgctcattcaactcctccctccaattagagaaatccaatttcacctttccttttctagattccaaaatcttattcaacccctgtaatgccactttaacatcaccacaaatcgacacatgaggttgcttattcttcccgatttcagcagaatcgatatcgatgtgcacaatcttagcccggctagca

SEQ ID NO: 142 - DNA, 200 bp, Amaranthus palmeri
ttgaatgagcagaaaaagaagtttcctttgagttttaagactttcggggatgcaattcctccgcaatacgccattcaggttcttgacgagttgacgaagggtgatgcggttgtaagtaccggtgttgggcagcaccaaatgtgggctgcccaattctataagtaccgaaatcctcgccaatggctgacctcgggtggttt

SEQ ID NO: 143 - DNA, 200 bp, Amaranthus palmeri
aaaccacccgaggtcagccattggcgaggatttcggtacttatagaattgggcagcccacatttggtgctgcccaacaccggtacttacaaccgcatcacccttcgtcaactcgtcaagaacctgaatggcgtattgcggaggaattgcatccccgaaagtcttaaaactcaaaggaaacttctttttctgctcattcaa

SEQ ID NO: 144 - DNA, 200 bp, Amaranthus palmeri
gccaatggctgacctcgggtggtttgggggctatggggtttggtctaccagctgcaattggagctgctgttgctcgaccagatgcggtggttgtagacattgatggggatgggagttttatcatgaatgttcaagagttggctacgattagggtggagaatctcccggttaaaatcatgctcttgaacaatcaacattta

SEQ ID NO: 145 - DNA, 200 bp, Amaranthus palmeri
taaatgttgattgttcaagagcatgattttaaccgggagattctccaccctaatcgtagccaactcttgaacattcatgataaaactcccatccccatcaatgtctacaaccaccgcatctggtcgagcaacagcagctccaattgcagctggtagaccaaaccccatagcccccaaaccacccgaggtcagccattggc

SEQ ID NO: 146 - DNA, 200 bp, Amaranthus palmeri
catgctcttgaacaatcaacatttaggtatggttgttcaatgggaagatcgattttacaaagctaaccgggcacatacatacctcgggaatccttccaattcttccgaaatcttcccggatatgctcaaattcgctgaagcatgtgatataccagcagctcgtgttaccaaggtgagcgatttaagggctgcaattcaaa

SEQ ID NO: 147 - DNA, 200 bp, Amaranthus palmeri
tttgaattgcagcccttaaatcgctcaccttggtaacacgagctgctggtatatcacatgcttcagcgaatttgagcatatccgggaagatttcggaagaattggaaggattcccgaggtatgtatgtgcccggttagctttgtaaaatcgatcttcccattgaacaaccatacctaaatgttgattgttcaagagcatg

SEQ ID NO: 148 - DNA, 200 bp, Amaranthus palmeri
agcgatttaagggctgcaattcaaacaatgttggatactccaggaccgtatctgctggatgtaatcgtaccacatcaggagcatgtgctgcctatgatccctagcggtgccgccttcaaggacaccatcacagagggtgatggaagaagggcttattagttggttggagatctttatagaggagaagcttttttgtatgt

SEQ ID NO: 149 - DNA, 200 bp, Amaranthus palmeri
acatacaaaaaagcttctcctctataaagatctccaaccaactaataagcccttcttccatcaccctctgtgatggtgtccttgaaggcggcaccgctagggatcataggcagcacatgctcctgatgtggtacgattacatccagcagatacggtcctggagtatccaacattgtttgaattgcagcccttaaatcgct

SEQ ID NO: 150 - DNA, 200 bp, Amaranthus palmeri
atagaggagaagcttttttgtatgtatgttagtatttccataaacttctatattctctggccggcctctcgtttagctgtttttatgttagtttgttgttttcatgttgcttgctactttgaaaaacccttgtgttttagacccattagcatgaataatcatcctatattattgtatggtttgatacacgctagttgttt

SEQ ID NO: 151 - DNA, 200 bp, Amaranthus palmeri
aaacaactagcgtgtatcaaaccatacaataatataggatgattattcatgctaatgggtctaaaacacaagggtttttcaaagtagcaagcaacatgaaaacaacaaactaacataaaaacagctaaacgagaggccggccagagaatatagaagtttatggaaatactaacatacatacaaaaaagcttctcctctat

SEQ ID NO: 152 - DNA, 200 bp, Amaranthus palmeri
tgatcatgaaattagtttgaggaatcgttttttcgagtactgaagactagaaaggaacttgagacatcagtttgggaattcgatggagtagcggatcgttcttcactttttgctcgggaggtatcaatggcgtaaattttttttggagactgactcaaatgggattctttgtgtagtgtacagcttcacttaccacagga

SEQ ID NO: 153 - DNA, 200 bp, Amaranthus palmeri
tcctgtggtaagtgaagctgtacactacacaaagaatcccatttgagtcagtctccaaaaaaaatttacgccattgatacctcccgagcaaaaagtgaagaacgatccgctactccatcgaattcccaaactgatgtctcaagttcctttctagtcttcagtactcgaaaaaacgattcctcaaactaatttcatgatca

SEQ ID NO: 154 - DNA, 200 bp, Amaranthus palmeri
gtgtacagcttcacttaccacaggaacacaggtgttttttgctatataggtacagaaactcggaaaagtccacatttactctataacttcatttacggtctaaaagtagttgagaaggtaaaatttaggatgcaattttttgaaagctttctatgatagcaaattcttactttttatttctactggtaattgtcattttg

SEQ ID NO: 155 - DNA, 200 bp, Amaranthus palmeri
caaaatgacaattaccagtagaaataaaaagtaagaatttgctatcatagaaagctttcaaaaaattgcatcctaaattttaccttctcaactacttttagaccgtaaatgaagttatagagtaaatgtggacttttccgagtttctgtacctatatagcaaaaaacacctgtgttcctgtggtaagtgaagctgtacac

SEQ ID NO: 156 - DNA, 200 bp, Amaranthus palmeri
atttctactggtaattgtcattttgtcaatgtcctttgcaaagactaattttacagacttgttattttcgtttaaaatgtttcgtatgataccgaaccagaaagagaaacaagaaattcgggcgaatttttctcgtcatatgttagatcgaaaccatatgatcagcttgatcttggttgtactggtgtattgattttcat

SEQ ID NO: 157 - DNA, 200 bp, Amaranthus palmeri
atgaaaatcaatacaccagtacaaccaagatcaagctgatcatatggtttcgatctaacatatgacgagaaaaattcgcccgaatttcttgtttctctttctggttcggtatcatacgaaacattttaaacgaaaataacaagtctgtaaaattagtctttgcaaaggacattgacaaaatgacaattaccagtagaaat

SEQ ID NO: 158 - DNA, 200 bp, Amaranthus palmeri
gttgtactggtgtattgattttcatggtaaatgtcaatattttcatggtaaacaacttgggtgccaattttgttagggttagatttggtgctgcttttgaatcagagatgaaatcagccgagaaatgaagataaattggggtgattttgcaaaatagtttgtctgttaattttaacttatatttgttacattctttgtta

SEQ ID NO: 159 - DNA, 200 bp, Amaranthus palmeri
taacaaagaatgtaacaaatataagttaaaattaacagacaaactattttgcaaaatcaccccaatttatcttcatttctcggctgatttcatctctgattcaaaagcagcaccaaatctaaccctaacaaaattggcacccaagttgtttaccatgaaaatattgacatttaccatgaaaatcaatacaccagtacaac

SEQ ID NO: 160 - DNA, 200 bp, Amaranthus palmeri
cttatatttgttacattctttgttacttgcaccattgttgactttggtactattcatcaagcaaatcgactttcatattgtcggtaatctataaaataaaatatagttttctgagatcttgttgaatcgtctcgattcaacggttattaatttttagttttcataattttttgatatgtataataaaagatattaacaat

SEQ ID NO: 161 - DNA, 200 bp, Amaranthus palmeri
attgttaatatcttttattatacatatcaaaaaattatgaaaactaaaaattaataaccgttgaatcgagacgattcaacaagatctcagaaaactatattttattttatagattaccgacaatatgaaagtcgatttgcttgatgaatagtaccaaagtcaacaatggtgcaagtaacaaagaatgtaacaaatataag

SEQ ID NO: 162 - DNA, 200 bp, Amaranthus palmeri
atgtataataaaagatattaacaattgatatcctgtatttggggtacgaaaaagcaaatagtgcaagtaaaaaagaacggaggaagtacatgtacaattatcactcaactattagataaattagttggttgagataaatcgttagaacttagaaatcaccaaatctataataagcttttcgcattagcgtgtttgatatc

SEQ ID NO: 163 - DNA, 200 bp, Amaranthus palmeri
gatatcaaacacgctaatgcgaaaagcttattatagatttggtgatttctaagttctaacgatttatctcaaccaactaatttatctaatagttgagtgataattgtacatgtacttcctccgttcttttttacttgcactatttgctttttcgtaccccaaatacaggatatcaattgttaatatcttttattatacat

SEQ ID NO: 164 - DNA, 200 bp, Amaranthus palmeri
ttttcgcattagcgtgtttgatatcagctgcttagttgatgaaattagatggttaaatcactcgcttgaagctatcacttatcaaccgtttgtcaaagatccttgcattttaattcattgtgacttgtgagatagatctatatgaagaatttaaattttaacaataagcgttttaatatttaaagctggtgttttgataa

SEQ ID NO: 165 - DNA, 200 bp, Amaranthus palmeri
ttatcaaaacaccagctttaaatattaaaacgcttattgttaaaatttaaattcttcatatagatctatctcacaagtcacaatgaattaaaatgcaaggatctttgacaaacggttgataagtgatagcttcaagcgagtgatttaaccatctaatttcatcaactaagcagctgatatcaaacacgctaatgcgaaaa

SEQ ID NO: 166 - DNA, 200 bp, Amaranthus palmeri
atatttaaagctggtgttttgataaatttaattaaactatttagataagttcggactgtctcttcatgagagatgagactgtatcaatcagctaatttataatcacctaaatatctccttatcatcataatacatccacctcataaaatctataaccagaatctaaaagagggatggaagacgacaagtcaacccctcac

SEQ ID NO: 167 - DNA, 200 bp, Amaranthus palmeri
gtgaggggttgacttgtcgtcttccatccctcttttagattctggttatagattttatgaggtggatgtattatgatgataaggagatatttaggtgattataaattagctgattgatacagtctcatctctcatgaagagacagtccgaacttatctaaatagtttaattaaatttatcaaaacaccagctttaaatat

SEQ ID NO: 168 - DNA, 200 bp, Amaranthus palmeri
ggaagacgacaagtcaacccctcacctaatcatgtctttgatgttaatagcataaaagcacatgagtgatgagaacaaacacatcaaccctaatcttatccaagaaaataccccattaggcattaaggtccttttcttttgttttcttttgccctaaaaagcaaaagtggaaagaaacccaaaaaaatcaatttcacgtt

SEQ ID NO: 169 - DNA, 200 bp, Amaranthus palmeri
aacgtgaaattgatttttttgggtttctttccacttttgctttttagggcaaaagaaaacaaaagaaaaggaccttaatgcctaatggggtattttcttggataagattagggttgatgtgtttgttctcatcactcatgtgcttttatgctattaacatcaaagacatgattaggtgaggggttgacttgtcgtcttcc

SEQ ID NO: 170 - DNA, 200 bp, Amaranthus palmeri
aacccaaaaaaatcaatttcacgttgcaaattgtcaaatttttttataaaaaaaaatgaaaaatctttataccacaaaaacaaaaagcaacaatgaaaatttagaatcatactcccgtttcaatttacttgcaacagttacgcagtttaatacactaattcaatccttaatatctataattataaataataaaaaattat

SEQ ID NO: 171 - DNA, 200 bp, Amaranthus palmeri
ataattttttattatttataattatagatattaaggattgaattagtgtattaaactgcgtaactgttgcaagtaaattgaaacgggagtatgattctaaattttcattgttgctttttgtttttgtggtataaagatttttcatttttttttataaaaaaatttgacaatttgcaacgtgaaattgatttttttgggtt

SEQ ID NO: 172 - DNA, 200 bp, Amaranthus palmeri
ataattataaataataaaaaattataaaaatttaatattaataatctttgcaatgagatgaatcaaacaagatttcactaataaataatgtcatttttttatatgttgcaactgatatggaacagagaaagtatcaatcttgatattcaagggtatttaagtaattacagaacaaccattgttatttgttaagcgcctcc

SEQ ID NO: 173 - DNA, 200 bp, Amaranthus palmeri
ggaggcgcttaacaaataacaatggttgttctgtaattacttaaatacccttgaatatcaagattgatactttctctgttccatatcagttgcaacatataaaaaaatgacattatttattagtgaaatcttgtttgattcatctcattgcaaagattattaatattaaatttttataattttttattatttataattat

SEQ ID NO: 174 - DNA, 200 bp, Amaranthus palmeri
ccattgttatttgttaagcgcctccactcatttcttcttccttctcagttattccatttctccattttcgcttagctttcctctcacacaaattacctccatttccaacctttcaagctttcaacaatggcgtccacttcaacaaacccaccattttcctcttttactaaacctaacaaaatccctaatctgcaatcatc

SEQ ID NO: 175 - DNA, 200 bp, Amaranthus palmeri
gatgattgcagattagggattttgttaggtttagtaaaagaggaaaatggtgggtttgttgaagtggacgccattgttgaaagcttgaaaggttggaaatggaggtaatttgtgtgagaggaaagctaagcgaaaatggagaaatggaataactgagaaggaagaagaaatgagtggaggcgcttaacaaataacaatgg

SEQ ID NO: 176 - DNA, 200 bp, Amaranthus palmeri
acaaaatccctaatctgcaatcatccatttacgctatccctttttccaattctcttaaacccacttcttcttcttcaatcctccgccgccctcttcaaatctcatcatcttcttctcaatcacctaaacctaaacctccttccgctactataactcaatcaccttcatctctcaccgatgataaaccctcttcttttgtt

SEQ ID NO: 177 - DNA, 200 bp, Amaranthus palmeri
aacaaaagaagagggtttatcatcggtgagagatgaaggtgattgagttatagtagcggaaggaggtttaggtttaggtgattgagaagaagatgatgagatttgaagagggcggcggaggattgaagaagaagaagtgggtttaagagaattggaaaaagggatagcgtaaatggatgattgcagattagggattttgt

SEQ ID NO: 178 - DNA, 200 bp, Amaranthus palmeri
cgatgataaaccctcttcttttgtttcccgatttagccctgaagaacccagaaaaggttgcgatgttctcgttgaagctcttgaacgtgaaggtgttaccgatgtttttgcttaccctggtggagcatccatggaaatccatcaagctcttactcgttctaatatcattagaaatgttcttcctcgacatgaacaaggtg

SEQ ID NO: 179 - DNA, 200 bp, Amaranthus palmeri
caccttgttcatgtcgaggaagaacatttctaatgatattagaacgagtaagagcttgatggatttccatggatgctccaccagggtaagcaaaaacatcggtaacaccttcacgttcaagagcttcaacgagaacatcgcaaccttttctgggttcttcagggctaaatcgggaaacaaaagaagagggtttatcatcg

SEQ ID NO: 180 - DNA, 200 bp, Amaranthus palmeri
gttcttcctcgacatgaacaaggtggggttttcgctgctgaaggctacgctcgtgctactggacgcgttggagtttgtattgccacttctggtccaggtgctactaatcttgtttctggtcttgctgatgcacttcttgactcagtcccgcttgtcgccattactgggcaagttccccggcgtatgattggtactgatgc

SEQ ID NO: 181 - DNA, 200 bp, Amaranthus palmeri
gcatcagtaccaatcatacgccggggaacttgcccagtaatggcgacaagcgggactgagtcaagaagtgcatcagcaagaccagaaacaagattagtagcacctggaccagaagtggcaatacaaactccaacgcgtccagtagcacgagcgtagccttcagcagcgaaaaccccaccttgttcatgtcgaggaagaac

SEQ ID NO: 182 - DNA, 200 bp, Amaranthus palmeri
cccggcgtatgattggtactgatgctttccaagagactccaattgttgaggtaactcgatccattactaagcataattatttggtgttagatgttgaggatattcctagaattgttaaggaagctttctttttagctaattctggtagacctggacctgttttgattgatattcctaaagatattcagcaacaattagtt

SEQ ID NO: 183 - DNA, 200 bp, Amaranthus palmeri
aactaattgttgctgaatatctttaggaatatcaatcaaaacaggtccaggtctaccagaattagctaaaaagaaagcttccttaacaattctaggaatatcctcaacatctaacaccaaataattatgcttagtaatggatcgagttacctcaacaattggagtctcttggaaagcatcagtaccaatcatacgccggg

SEQ ID NO: 184 - DNA, 200 bp, Amaranthus palmeri
taaagatattcagcaacaattagttgttcctaattgggaacagtccattaaattgggtgggtatctttctaggttgcctaaacccacttattctgctaatgaagagggacttcttgatcaaattgtaaggttagtgggtgagtctaagagacctgtgctgtatactggaggtgggtgtttgaattctagtgaagaattga

SEQ ID NO: 185 - DNA, 200 bp, Amaranthus palmeri
tcaattcttcactagaattcaaacacccacctccagtatacagcacaggtctcttagactcacccactaaccttacaatttgatcaagaagtccctcttcattagcagaataagtgggtttaggcaacctagaaagatacccacccaatttaatggactgttcccaattaggaacaactaattgttgctgaatatcttta

SEQ ID NO: 186 - DNA, 200 bp, Amaranthus palmeri
tgtttgaattctagtgaagaattgaggaaatttgtcgaattgacagggattccggtggctagtactttaatgggtttgggggctttcccttgtactgatgatttatcacttcatatgttgggaatgcacgggactgtgtatgcgaattacgcggttgataaggccgatttgttgcttgctttcggggttaggtttgatga

SEQ ID NO: 187 - DNA, 200 bp, Amaranthus palmeri
tcatcaaacctaaccccgaaagcaagcaacaaatcggccttatcaaccgcgtaattcgcatacacagtcccgtgcattcccaacatatgaagtgataaatcatcagtacaagggaaagcccccaaacccattaaagtactagccaccggaatccctgtcaattcgacaaatttcctcaattcttcactagaattcaaaca

SEQ ID NO: 188 - DNA, 200 bp, Amaranthus palmeri
ttgctttcggggttaggtttgatgatcgagtgactggtaagctcgaggcgtttgctagccgggctaagattgtgcacatcgatatcgattctgctgaaatcgggaagaataagcaacctcatgtgtcgatttgtggtgatgttaaagtggcattacaggggttgaataagattttggaatctagaaaaggaaaggtgaaa

SEQ ID NO: 189 - DNA, 200 bp, Amaranthus palmeri
tttcacctttccttttctagattccaaaatcttattcaacccctgtaatgccactttaacatcaccacaaatcgacacatgaggttgcttattcttcccgatttcagcagaatcgatatcgatgtgcacaatcttagcccggctagcaaacgcctcgagcttaccagtcactcgatcatcaaacctaaccccgaaagcaa

SEQ ID NO: 190 - DNA, 200 bp, Amaranthus palmeri
ggaatctagaaaaggaaaggtgaaattggatttctctaattggagggaggagttgaatgagcagaaaaagaagtttcctttgagttttaagactttcggggatgcaattcctccgcaatacgccattcaggttcttgacgagttgacaaagggtgatgcggttgtaagtaccggtgttgggcagcaccaaatgtgggctg

SEQ ID NO: 191 - DNA, 200 bp, Amaranthus palmeri
cagcccacatttggtgctgcccaacaccggtacttacaaccgcatcaccctttgtcaactcgtcaagaacctgaatggcgtattgcggaggaattgcatccccgaaagtcttaaaactcaaaggaaacttctttttctgctcattcaactcctccctccaattagagaaatccaatttcacctttccttttctagattcc

SEQ ID NO: 192 - DNA, 200 bp, Amaranthus palmeri
gttgggcagcaccaaatgtgggctgcccaattctataagtaccgaaatcctcgtcaatggctgacctcgggtggtttgggggctatggggtttggtctaccagctgctattggagctgctgttgctcgaccagatgcggtggttgtagacattgatggggatgggagttttatcatgaatgttcaagagttggctacgat

SEQ ID NO: 193 - DNA, 200 bp, Amaranthus palmeri
atcgtagccaactcttgaacattcatgataaaactcccatccccatcaatgtctacaaccaccgcatctggtcgagcaacagcagctccaatagcagctggtagaccaaaccccatagcccccaaaccacccgaggtcagccattgacgaggatttcggtacttatagaattgggcagcccacatttggtgctgcccaac

SEQ ID NO: 194 - DNA, 200 bp, Amaranthus palmeri
tgaatgttcaagagttggctacgattagggtggagaatctcccggttaaaatcatgctcttgaacaatcaacatttaggtatggttgttcaatgggaagatcgattttacaaagctaaccgggcacatacatacctcgggaatccttccaattcttccgaaatcttcccggatatgctcaaatttgctgaagcatgtgat

SEQ ID NO: 195 - DNA, 200 bp, Amaranthus palmeri
atcacatgcttcagcaaatttgagcatatccgggaagatttcggaagaattggaaggattcccgaggtatgtatgtgcccggttagctttgtaaaatcgatcttcccattgaacaaccatacctaaatgttgattgttcaagagcatgattttaaccgggagattctccaccctaatcgtagccaactcttgaacattca

SEQ ID NO: 196 - DNA, 200 bp, Amaranthus palmeri
gctcaaatttgctgaagcatgtgatataccagcagcccgtgttaccaaggtgagcgatttaagggctgcaattcaaacaatgttggatactccaggaccgtatctgctggatgtaatcgtaccacatcaggagcatgtgctgcctatgatccctagcggcgccgccttcaaggacaccatcactgagggtgatggaagaa

SEQ ID NO: 197 - DNA, 200 bp, Amaranthus palmeri
ttcttccatcaccctcagtgatggtgtccttgaaggcggcgccgctagggatcataggcagcacatgctcctgatgtggtacgattacatccagcagatacggtcctggagtatccaacattgtttgaattgcagcccttaaatcgctcaccttggtaacacgggctgctggtatatcacatgcttcagcaaatttgagc

SEQ ID NO: 198 - DNA, 200 bp, Amaranthus palmeri
accatcactgagggtgatggaagaagggcttattagttggttggagatctttatagaggagaagcttttttgtatgtatgttagtatttccataaacttctatattctctggccggcctctcgtttagctgtttttatgttagtttgttgttttcatgttgcttgctactttgaaaaacccttttgtgttttagacccat

SEQ ID NO: 199 - DNA, 200 bp, Amaranthus palmeri
atgggtctaaaacacaaaagggtttttcaaagtagcaagcaacatgaaaacaacaaactaacataaaaacagctaaacgagaggccggccagagaatatagaagtttatggaaatactaacatacatacaaaaaagcttctcctctataaagatctccaaccaactaataagcccttcttccatcaccctcagtgatggt

SEQ ID NO: 200 - DNA, 200 bp, Amaranthus palmeri
aaacccttttgtgttttagacccattagcatgaataatcatcctatattattgtatggtttgatacacgctagttgtttctttttatcatcgagataaagacaactactaatcggtgtaaccatgtttgtctcacattgctcgacgttttgttctcctttgatgaatttgatattaggaagtttgtttgatactagtgaa

SEQ ID NO: 201 - DNA, 200 bp, Amaranthus palmeri
ttcactagtatcaaacaaacttcctaatatcaaattcatcaaaggagaacaaaacgtcgagcaatgtgagacaaacatggttacaccgattagtagttgtctttatctcgatgataaaaagaaacaactagcgtgtatcaaaccatacaataatataggatgattattcatgctaatgggtctaaaacacaaaagggttt

SEQ ID NO: 202 - DNA, 200 bp, Amaranthus palmeri
aggaagtttgtttgatactagtgaatcctcatgtcctatcctgttttctcgtcttagcgaacattggtattgtatctcttggtgggtataggagtattcgattcgttgttatgttcgactccttcagtgcttttggtgggtttttcaaagaaggaaaaggaagcagaaatggccttagaatgtaaagtggtctttttctg

SEQ ID NO: 203 - DNA, 200 bp, Amaranthus palmeri
cagaaaaagaccactttacattctaaggccatttctgcttccttttccttctttgaaaaacccaccaaaagcactgaaggagtcgaacataacaacgaatcgaatactcctatacccaccaagagatacaataccaatgttcgctaagacgagaaaacaggataggacatgaggattcactagtatcaaacaaacttcct

SEQ ID NO: 204 - DNA, 200 bp, Amaranthus palmeri
tagaatgtaaagtggtctttttctgtaagtgggtattgcctttcatcagccatgtttttatctttatattttgtggtctttgaggctttatgtttagtgtttggtgtcttttcgtcgtattctgtgatcagttctgaaatgtggatcgtaaagacatagatgatgaggaagagggtcgggatgagagcagcgttttactc

SEQ ID NO: 205 - DNA, 200 bp, Amaranthus palmeri
gagtaaaacgctgctctcatcccgaccctcttcctcatcatctatgtctttacgatccacatttcagaactgatcacagaatacgacgaaaagacaccaaacactaaacataaagcctcaaagaccacaaaatataaagataaaaacatggctgatgaaaggcaatacccacttacagaaaaagaccactttacattcta

SEQ ID NO: 206 - DNA, 200 bp, Amaranthus palmeri
tcgggatgagagcagcgttttactcgaaaagcgatcctagtaaggaccgaaccgagtcaacatttcgagatgatatgtgttcgagtttgacatgaaaatctatctgcctgctcagtgctcacaatggtaaattgtactgtaaatgattgttatgtcatgttggtttttcatctggaaatgtgtatctgtaatggttcttg

SEQ ID NO: 207 - DNA, 200 bp, Amaranthus palmeri
caagaaccattacagatacacatttccagatgaaaaaccaacatgacataacaatcatttacagtacaatttaccattgtgagcactgagcaggcagatagattttcatgtcaaactcgaacacatatcatctcgaaatgttgactcggttcggtccttactaggatcgcttttcgagtaaaacgctgctctcatcccga

SEQ ID NO: 208 - DNA, 200 bp, Amaranthus palmeri
aaatgtgtatctgtaatggttcttgtcagttgattgtatcggtgttcattcgggttgattttgggttaggttttcaagactgtttgaaatcaatttatgtcattgtgtctatattgtttgttacataactgcaaatcatttttgaagtcgtatcaaatcggattcaattataaggttgggtgaattttgagtcattgggt

SEQ ID NO: 209 - DNA, 200 bp, Amaranthus palmeri
acccaatgactcaaaattcacccaaccttataattgaatccgatttgatacgacttcaaaaatgatttgcagttatgtaacaaacaatatagacacaatgacataaattgatttcaaacagtcttgaaaacctaacccaaaatcaacccgaatgaacaccgatacaatcaactgacaagaaccattacagatacacattt

SEQ ID NO: 210 - DNA, 200 bp, Amaranthus palmeri
ttgggtgaattttgagtcattgggtctgaattaaacacctatcccaaggattatacatttgttgcaattttgctcttttcattcttaaatttggcttcatcacggtgttttgttttataagattctattcgaatctaaagccgaacacacttgatcattaacatatgactaatttaacataattggccggctaattagcc

SEQ ID NO: 211 - DNA, 200 bp, Amaranthus palmeri
ggctaattagccggccaattatgttaaattagtcatatgttaatgatcaagtgtgttcggctttagattcgaatagaatcttataaaacaaaacaccgtgatgaagccaaatttaagaatgaaaagagcaaaattgcaacaaatgtataatccttgggataggtgtttaattcagacccaatgactcaaaattcacccaa

SEQ ID NO: 212 - DNA, 200 bp, Amaranthus palmeri
aacataattggccggctaattagccatataaattcaaggttgcttaaaattgttgaagaatagccctaaagacgtataatcacttttaatattttttaattttttaacgtgatttgatttgatatcttttaatatactattaggctcattgtatgctacaaatttgaggggaaaactatgaacaacaattcatattaata

SEQ ID NO: 213 - DNA, 200 bp, Amaranthus palmeri
tattaatatgaattgttgttcatagttttcccctcaaatttgtagcatacaatgagcctaatagtatattaaaagatatcaaatcaaatcacgttaaaaaattaaaaaatattaaaagtgattatacgtctttagggctattcttcaacaattttaagcaaccttgaatttatatggctaattagccggccaattatgtt

SEQ ID NO: 214 - DNA, 200 bp, Amaranthus palmeri
ctatgaacaacaattcatattaatatgttttttaacaaacaagaaaaatagaaagttaaaagacaatgattcatcaaataaatcatgtgtactttttattcgtttgtagttgcatatgacgttacaaccatcgaaaacaatcattttattagttttatcattgattgtttttgatggttgtaacgtcatatgcaaccata

SEQ ID NO: 215 - DNA, 200 bp, Amaranthus palmeri
tatggttgcatatgacgttacaaccatcaaaaacaatcaatgataaaactaataaaatgattgttttcgatggttgtaacgtcatatgcaactacaaacgaataaaaagtacacatgatttatttgatgaatcattgtcttttaactttctatttttcttgtttgttaaaaaacatattaatatgaattgttgttcatag

SEQ ID NO: 216 - DNA, 200 bp, Amaranthus palmeri
ggttgtaacgtcatatgcaaccataaacgtataaaaagtgactcaatttctagaggctaaaacaattgggttgcctaacaagtgttgatttaatattaggttgtttgtgcttacttaataaatctctacactagtcttaaaattgtaatctaaattgtgctacaaaaataggtaattaattagaaaagtcgattaaatca

SEQ ID NO: 217 - DNA, 200 bp, Amaranthus palmeri
tgatttaatcgacttttctaattaattacctatttttgtagcacaatttagattacaattttaagactagtgtagagatttattaagtaagcacaaacaacctaatattaaatcaacacttgttaggcaacccaattgttttagcctctagaaattgagtcactttttatacgtttatggttgcatatgacgttacaacc

SEQ ID NO: 218 - DNA, 200 bp, Amaranthus palmeri
ttaattagaaaagtcgattaaatcaatcttttagggtatattagcaattattactaatgattataagtaaccgagaggtcttgtcatttaggattaattgatattaggtcttttgagagccgtctttacaaaatacggtctcaagtaagaatttatgaattttttttattcttacatgactcatggaaagattcctagtt

SEQ ID NO: 219 - DNA, 200 bp, Amaranthus palmeri
aactaggaatctttccatgagtcatgtaagaataaaaaaaattcataaattcttacttgagaccgtattttgtaaagacggctctcaaaagacctaatatcaattaatcctaaatgacaagacctctcggttacttataatcattagtaataattgctaatataccctaaaagattgatttaatcgacttttctaattaa

SEQ ID NO: 220 - DNA, 200 bp, Amaranthus palmeri; identical to SEQ ID NO: 152

SEQ ID NO: 221 - DNA, 200 bp, Amaranthus palmeri; identical to SEQ ID NO: 153

SEQ ID NO: 222 - DNA, 200 bp, Amaranthus palmeri; identical to SEQ ID NO: 154

SEQ ID NO: 223 - DNA, 200 bp, Amaranthus palmeri; identical to SEQ ID NO: 155

SEQ ID NO: 224 - DNA, 200 bp, Amaranthus palmeri; identical to SEQ ID NO: 156

SEQ ID NO: 225 - DNA, 200 bp, Amaranthus palmeri; identical to SEQ ID NO: 157

SEQ ID NO: 226 - DNA, 200 bp, Amaranthus palmeri; identical to SEQ ID NO: 158

SEQ ID NO: 227 - DNA, 200 bp, Amaranthus palmeri; identical to SEQ ID NO: 159

SEQ ID NO: 228 - DNA, 200 bp, Amaranthus palmeri; identical to SEQ ID NO: 160

SEQ ID NO: 229 - DNA, 200 bp, Amaranthus palmeri; identical to SEQ ID NO: 161

SEQ ID NO: 230 - DNA, 200 bp, Amaranthus palmeri; identical to SEQ ID NO: 162

SEQ ID NO: 231 - DNA, 200 bp, Amaranthus palmeri; identical to SEQ ID NO: 163

SEQ ID NO: 232 - DNA, 200 bp, Amaranthus palmeri; identical to SEQ ID NO: 164

SEQ ID NO: 233 - DNA, 200 bp, Amaranthus palmeri; identical to SEQ ID NO: 165

SEQ ID NO: 234 - DNA, 200 bp, Amaranthus palmeri; identical to SEQ ID NO: 166

SEQ ID NO: 235 - DNA, 200 bp, Amaranthus palmeri; identical to SEQ ID NO: 167

SEQ ID NO: 236 - DNA, 200 bp, Amaranthus palmeri; identical to SEQ ID NO: 168

SEQ ID NO: 237 - DNA, 200 bp, Amaranthus palmeri; identical to SEQ ID NO: 169

SEQ ID NO: 238 - DNA, 200 bp, Amaranthus palmeri; identical to SEQ ID NO: 170

SEQ ID NO: 239 - DNA, 200 bp, Amaranthus palmeri; identical to SEQ ID NO: 171

SEQ ID NO: 240 - DNA, 200 bp, Amaranthus palmeri; identical to SEQ ID NO: 172

SEQ ID NO: 241 - DNA, 200 bp, Amaranthus palmeri; identical to SEQ ID NO: 173

SEQ ID NO: 242 - DNA, 200 bp, Amaranthus palmeri; identical to SEQ ID NO: 174

SEQ ID NO: 243 - DNA, 200 bp, Amaranthus palmeri; identical to SEQ ID NO: 175

SEQ ID NO: 244 - DNA, 200 bp, Amaranthus palmeri; identical to SEQ ID NO: 176

SEQ ID NO: 245 - DNA, 200 bp, Amaranthus palmeri; identical to SEQ ID NO: 177

SEQ ID NO: 246 - DNA, 200 bp, Amaranthus palmeri; identical to SEQ ID NO: 178

SEQ ID NO: 247 - DNA, 200 bp, Amaranthus palmeri; identical to SEQ ID NO: 179

SEQ ID NO: 248 - DNA, 200 bp, Amaranthus palmeri
gttcttcctcgacatgaacaaggtggggttttcgctgctgaaggctacgctcgtgctactggacgcgttggagtttgtattgccacttctggtccgggtgctactaatcttgtctctggtcttgctgatgcgcttcttgactcagtcccgctcgtcgccattactgggcaagttccccggcgtatgattggtactgatgc

SEQ ID NO: 249 - DNA, 200 bp, Amaranthus palmeri
gcatcagtaccaatcatacgccggggaacttgcccagtaatggcgacgagcgggactgagtcaagaagcgcatcagcaagaccagagacaagattagtagcacccggaccagaagtggcaatacaaactccaacgcgtccagtagcacgagcgtagccttcagcagcgaaaaccccaccttgttcatgtcgaggaagaac

SEQ ID NO: 250 - DNA, 200 bp, Amaranthus palmeri
cccggcgtatgattggtactgatgcttttcaagagactccaattgttgaggtaactcgatccattactaagcataattatttggtgttagatgttgaggatattcctagaattgttaaggaagctttctttttagctaattctggtagacctggacctgttttgattgatattcctaaagatattcagcaacaattagtt

SEQ ID NO: 251 - DNA, 200 bp, Amaranthus palmeri
aactaattgttgctgaatatctttaggaatatcaatcaaaacaggtccaggtctaccagaattagctaaaaagaaagcttccttaacaattctaggaatatcctcaacatctaacaccaaataattatgcttagtaatggatcgagttacctcaacaattggagtctcttgaaaagcatcagtaccaatcatacgccggg

SEQ ID NO: 252 - DNA, 200 bp, Amaranthus palmeri
taaagatattcagcaacaattagttgttcctaattgggaacagcccattaaattgggtgggtatctttctaggttgcctaaacccacttattctgctaatgaagagggacttcttgatcaaattgtaaggttagtgggtgagtctaagagacctgtgctgtatactggaggtgggtgtttgaattctagtgaagaattga

SEQ ID NO: 253 - DNA, 200 bp, Amaranthus palmeri
tcaattcttcactagaattcaaacacccacctccagtatacagcacaggtctcttagactcacccactaaccttacaatttgatcaagaagtccctcttcattagcagaataagtgggtttaggcaacctagaaagatacccacccaatttaatgggctgttcccaattaggaacaactaattgttgctgaatatcttta

SEQ ID NO: 254 - DNA, 200 bp, Amaranthus palmeri; identical to SEQ ID NO: 186

SEQ ID NO: 255 - DNA, 200 bp, Amaranthus palmeri; identical to SEQ ID NO: 187

SEQ ID NO: 256 - DNA, 200 bp, Amaranthus palmeri; identical to SEQ ID NO: 188

SEQ ID NO: 257 - DNA, 200 bp, Amaranthus palmeri; identical to SEQ ID NO: 189

SEQ ID NO: 258 - DNA, 200 bp, Amaranthus palmeri; identical to SEQ ID NO: 190

SEQ ID NO: 259 - DNA, 200 bp, Amaranthus palmeri; identical to SEQ ID NO: 191

SEQ ID NO: 260 - DNA, 200 bp, Amaranthus palmeri
gttgggcagcaccaaatgtgggctgcccaattctataagtaccgaaatcctcgccaatggctgacctcgggtggtttgggggctatggggtttggtctaccagctgctattggagctgctgttgctcgaccagatgcggtggttgtagacattgatggggatgggagttttatcatgaatgttcaagagttggctacgat

SEQ ID NO: 261 - DNA, 200 bp, Amaranthus palmeri
atcgtagccaactcttgaacattcatgataaaactcccatccccatcaatgtctacaaccaccgcatctggtcgagcaacagcagctccaatagcagctggtagaccaaaccccatagcccccaaaccacccgaggtcagccattggcgaggatttcggtacttatagaattgggcagcccacatttggtgctgcccaac

SEQ ID NO: 262 - DNA, 200 bp, Amaranthus palmeri
tgaatgttcaagagttggctacgattagggtggagaatctcccggttaaaatcatgctcttgaacaatcaacatttaggtatggttgttcaatgggaagatcgattttacaaagctaaccgggcacatacatacctcgggaatccttccaattcttccgaaatcttcccggatatgctcaaattcgctgaagcatgtgat

SEQ ID NO: 263 - DNA, 200 bp, Amaranthus palmeri
atcacatgcttcagcgaatttgagcatatccgggaagatttcggaagaattggaaggattcccgaggtatgtatgtgcccggttagctttgtaaaatcgatcttcccattgaacaaccatacctaaatgttgattgttcaagagcatgattttaaccgggagattctccaccctaatcgtagccaactcttgaacattca

SEQ ID NO: 264 - DNA, 200 bp, Amaranthus palmeri
gctcaaattcgctgaagcatgtgatataccagcagctcgtgttaccaaggtgagcgatttaagggctgcaattcaaacaatgttggatactccaggaccgtatctgctggatgtaatcgtaccacatcaggagcatgtgctgcctatgatccctagcggtgccgccttcaaggacaccatcacagagggtgatggaagaa

SEQ ID NO: 265 - DNA, 200 bp, Amaranthus palmeri
ttcttccatcaccctctgtgatggtgtccttgaaggcggcaccgctagggatcataggcagcacatgctcctgatgtggtacgattacatccagcagatacggtcctggagtatccaacattgtttgaattgcagcccttaaatcgctcaccttggtaacacgagctgctggtatatcacatgcttcagcgaatttgagc

SEQ ID NO: 266 - DNA, 200 bp, Amaranthus palmeri
accatcacagagggtgatggaagaagggcttattagttggttggagatctttatagaggagaagcttttttgtatgtatgttagtatttccataaacttctatattctctggccggcctctcgtttagctgtttttatgttagtttgttgttttcatgttagtttgttgttttcatgttgcttgctactttgaaaaaccc

SEQ ID NO: 267 - DNA, 200 bp, Amaranthus palmeri
gggtttttcaaagtagcaagcaacatgaaaacaacaaactaacatgaaaacaacaaactaacataaaaacagctaaacgagaggccggccagagaatatagaagtttatggaaatactaacatacatacaaaaaagcttctcctctataaagatctccaaccaactaataagcccttcttccatcaccctctgtgatggt

SEQ ID NO: 268 - DNA, 200 bp, Amaranthus palmeri
tgttgcttgctactttgaaaaacccttttgtgttttagacccattagcatgaataatcatcctatattattgtatggttcgatacacgctagttgtttctttttattatcgagttaaagacaactactaatcggtgtaaccaagtttgtctcacattgctcgacgttttgttctcctttgatgaatttgatattaggaag

SEQ ID NO: 269 - DNA, 200 bp, Amaranthus palmeri
cttcctaatatcaaattcatcaaaggagaacaaaacgtcgagcaatgtgagacaaacttggttacaccgattagtagttgtctttaactcgataataaaaagaaacaactagcgtgtatcgaaccatacaataatataggatgattattcatgctaatgggtctaaaacacaaaagggtttttcaaagtagcaagcaaca

SEQ ID NO: 270 - DNA, 200 bp, Amaranthus palmeri
ctttgatgaatttgatattaggaagtttgtttgatactagtgaatcctcatgtcctatcctgttttctcgtcttagcgaacattggtattgtatctcttggtgggtataggagtattcgattcgttgttatgttcgactccttcagtgcttttggtgggtttttcaaagaaggaaaaggaagcagaaatggccttagaat

SEQ ID NO: 271 - DNA, 200 bp, Amaranthus palmeri
attctaaggccatttctgcttccttttccttctttgaaaaacccaccaaaagcactgaaggagtcgaacataacaacgaatcgaatactcctatacccaccaagagatacaataccaatgttcgctaagacgagaaaacaggataggacatgaggattcactagtatcaaacaaacttcctaatatcaaattcatcaaag

SEQ ID NO: 272 - DNA, 200 bp, Amaranthus palmeri
aaggaagcagaaatggccttagaatgtaaagtggtctttttctgtaagtgggtattgcctttcatcagccatgtttttatctttatattttgtggtctttgaggctttatgtttagtgtttggtgtcttttcgtcgtattctgtgatcagttctgaaatgtggatcgtaaagacatagatgatgaggaagagggtcggga

SEQ ID NO: 273 - DNA, 200 bp, Amaranthus palmeri
tcccgaccctcttcctcatcatctatgtctttacgatccacatttcagaactgatcacagaatacgacgaaaagacaccaaacactaaacataaagcctcaaagaccacaaaatataaagataaaaacatggctgatgaaaggcaatacccacttacagaaaaagaccactttacattctaaggccatttctgcttcctt

SEQ ID NO: 274 - DNA, 200 bp, Amaranthus palmeri
tagatgatgaggaagagggtcgggatgagagcagcgttttactcgaaaagcgatcctagtaaggaccgaaccgagtcaacatttcgagatgatatgtgttcgagtttgacatgaaaatctatctgcctgctcagtgctcacaatggtaaattgtactgtaaatgattgttatgtcatgttggtttttcatctggaaatgt

SEQ ID NO: 275 - DNA, 200 bp, Amaranthus palmeri
acatttccagatgaaaaaccaacatgacataacaatcatttacagtacaatttaccattgtgagcactgagcaggcagatagattttcatgtcaaactcgaacacatatcatctcgaaatgttgactcggttcggtccttactaggatcgcttttcgagtaaaacgctgctctcatcccgaccctcttcctcatcatcta

SEQ ID NO: 276 - DNA, 200 bp, Amaranthus palmeri
atgttggtttttcatctggaaatgtgtatctgtaatggttcttgtcagttgattgtatcggtgttcattcgggttgattttgggttaggttttcaagactgtttgaaatcaatttatgtcattgtgtctatattgtttgttacataactgcaaatcatttttgaagtcgtatcaaatcggattcaattataaggttgggt

SEQ ID NO: 277 - DNA, 200 bp, Amaranthus palmeri
acccaaccttataattgaatccgatttgatacgacttcaaaaatgatttgcagttatgtaacaaacaatatagacacaatgacataaattgatttcaaacagtcttgaaaacctaacccaaaatcaacccgaatgaacaccgatacaatcaactgacaagaaccattacagatacacatttccagatgaaaaaccaacat

SEQ ID NO: 278 - DNA, 200 bp, Amaranthus palmeri
atcggattcaattataaggttgggtgaattttgagtcattgggtctgaattaaacacctatcccaaggattatacatttgttgcaattttgctcttttcattcttaaatttggcttcatcacggtgttttgttttataagattctattcgaatctaaagccgaacacacttgatcattaacatatgactaatttaacata

SEQ ID NO: 279 - DNA, 200 bp, Amaranthus palmeri
tatgttaaattagtcatatgttaatgatcaagtgtgttcggctttagattcgaatagaatcttataaaacaaaacaccgtgatgaagccaaatttaagaatgaaaagagcaaaattgcaacaaatgtataatccttgggataggtgtttaattcagacccaatgactcaaaattcacccaaccttataattgaatccgat

SEQ ID NO: 280 - DNA, 200 bp, Amaranthus rudis
aaaaaaaaaaaaaaaagcaaagaatttagaatccaaatcaatcttgatattcaagggtatttaagtaattagagaacaaccatagttaagttaagcgcctccactcatttctcttcgtccttctcagtgattccctttctccattttcgcttagctctcctctcacacaaattacctccatttccaaccttccaagcttt

SEQ ID NO: 281 - DNA, 200 bp, Amaranthus rudis
aaagcttggaaggttggaaatggaggtaatttgtgtgagaggagagctaagcgaaaatggagaaagggaatcactgagaaggacgaagagaaatgagtggaggcgcttaacttaactatggttgttctctaattacttaaatacccttgaatatcaagattgatttggattctaaattctttgctttttttttttttttt

SEQ ID NO: 282 - DNA, 200 bp, Amaranthus rudis
ctccatttccaaccttccaagctttcaacaatggcgtccacttcttcaaacccaccatttttctattttactaaaccttacaaaatccctaatcgtcaatcctacatttacgctctccctttttccaattctcataaacccacttcttcttcttcttcttcttcaatcgtccgccgcgctcttcaaatctcattatcttc

SEQ ID NO: 283 - DNA, 200 bp, Amaranthus rudis
gaagataatgagatttgaagagcgcggcggacgattgaagaagaagaagaagaagaagtgggtttatgagaattggaaaaagggagagcgtaaatgtaggattgacgattagggattttgtaaggtttagtaaaatagaaaaatggtgggtttgaagaagtggacgccattgttgaaagcttggaaggttggaaatggag

SEQ ID NO: 284 - DNA, 200 bp, Amaranthus rudis
gcgctcttcaaatctcattatcttcttctcaatcacctaaacctaaacctccttccgctactataactcaatcaccttcatctctcaccgatgataaaccctcttcttttgtttcccgatttagccctgatgaacccagaaaaggttgcgatgttcttgttgaagctcttgaacgtgaaggtgttaccgatgtttttgct

SEQ ID NO: 285 - DNA, 200 bp, Amaranthus rudis
agcaaaaacatcggtaacaccttcacgttcaagagcttcaacaagaacatcgcaaccttttctgggttcatcagggctaaatcgggaaacaaaagaagagggtttatcatcggtgagagatgaaggtgattgagttatagtagcggaaggaggtttaggtttaggtgattgagaagaagataatgagatttgaagagcgc

SEQ ID NO: 286 - DNA, 200 bp, Amaranthus rudis
tgaaggtgttaccgatgtttttgcttaccctggtggagcttccatggaaatccatcaagctcttactcgttctaatatcattagaaatgttcttcctcgacatgaacaaggtggggttttcgctgctgaaggctacgctcgtgctactggacgtgttggagtttgtattgccacttctggtccgggtgctactaatcttg

SEQ ID NO: 287 - DNA, 200 bp, Amaranthus rudis
caagattagtagcacccggaccagaagtggcaatacaaactccaacacgtccagtagcacgagcgtagccttcagcagcgaaaaccccaccttgttcatgtcgaggaagaacatttctaatgatattagaacgagtaagagcttgatggatttccatggaagctccaccagggtaagcaaaaacatcggtaacaccttca

SEQ ID NO: 288 - DNA, 200 bp, Amaranthus rudis
tctggtccgggtgctactaatcttgtttccggttttgctgatgcacttcttgactcagtcccgcttgtcgccattactgggcaagttcctcggcgtatgattggtactgatgcttttcaagagactcctattgttgaggtaactcgatcaattactaagcataattatttggtgttagatgttgaggatatccctagaat

SEQ ID NO: 289 - DNA, 200 bp, Amaranthus rudis
attctagggatatcctcaacatctaacaccaaataattatgcttagtaattgatcgagttacctcaacaataggagtctcttgaaaagcatcagtaccaatcatacgccgaggaacttgcccagtaatggcgacaagcgggactgagtcaagaagtgcatcagcaaaaccggaaacaagattagtagcacccggaccaga

SEQ ID NO: 290 - DNA, 200 bp, Amaranthus rudis
tagatgttgaggatatccctagaattgttaaggaagctttctttttagctaattctggtagacctggacctgttttgattgatattcctaaagatattcagcaacaattggttgttcctaactgggaacagcccattaaattgggtgggtatctttctaggttgcctaaacccacttattctgctaatgaagagggactt

SEQ ID NO: 291 - DNA, 200 bp, Amaranthus rudis
aagtccctcttcattagcagaataagtgggtttaggcaacctagaaagatacccacccaatttaatgggctgttcccagttaggaacaaccaattgttgctgaatatctttaggaatatcaatcaaaacaggtccaggtctaccagaattagctaaaaagaaagcttccttaacaattctagggatatcctcaacatcta

SEQ ID NO: 292 - DNA, 200 bp, Amaranthus rudis
ttattctgctaatgaagagggacttcttgatcaaattgtgaggttggtgggtgagtctaagagacctgtgctgtatactggaggtgggtgtttgaattctagtgaagaattaaggaaatttgtcgggttgacagggattccggttgctagtactttaatggggttgggggctttcccttgtactgatgatttatcacttc

SEQ ID NO: 293 - DNA, 200 bp, Amaranthus rudis
gaagtgataaatcatcagtacaagggaaagcccccaaccccattaaagtactagcaaccggaatccctgtcaacccgacaaatttccttaattcttcactagaattcaaacacccacctccagtatacagcacaggtctcttagactcacccaccaacctcacaatttgatcaagaagtccctcttcattagcagaataa

SEQ ID NO: 294 - DNA, 200 bp, Amaranthus rudis
ccttgtactgatgatttatcacttcaaatgttgggaatgcacgggactgtgtacgcgaattacgcggtggataaggctgatttgttgcttgctttcggggttaggtttgatgatcgagtgactgggaagctcgaggcgtttgctagccgggctaagattgtgcacatcgatattgattctgctgaaatcgggaagaataa

SEQ ID NO: 295 - DNA, 200 bp, Amaranthus rudis
ttattcttcccgatttcagcagaatcaatatcgatgtgcacaatcttagcccggctagcaaacgcctcgagcttcccagtcactcgatcatcaaacctaaccccgaaagcaagcaacaaatcagccttatccaccgcgtaattcgcgtacacagtcccgtgcattcccaacatttgaagtgataaatcatcagtacaagg

SEQ ID NO: 296 - DNA, 200 bp, Amaranthus rudis
attctgctgaaatcgggaagaataagcaacctcatgtgtcgatttgtggtgatattaaagtggcattacaggggttgaataagattttggaatctagaaaaggaaagctgaaattggatttctctaattggagggaggagttgaatgagcagaaaaagaagtttcctttgagttttaagactttcggggatgcaattcct

SEQ ID NO: 297 - DNA, 200 bp, Amaranthus rudis
aggaattgcatccccgaaagtcttaaaactcaaaggaaacttctttttctgctcattcaactcctccctccaattagagaaatccaatttcagctttccttttctagattccaaaatcttattcaacccctgtaatgccactttaatatcaccacaaatcgacacatgaggttgcttattcttcccgatttcagcagaat

SEQ ID NO: 298 - DNA, 200 bp, Amaranthus rudis
aaaaaaaaagcaaagaatttagaatccaaatcaatcttgatattcaagggtatttaagtaattagagaacaaccatagttaagttaagcgcctccactcatttctcttcgtccttctcggtgattccctttctccattttcgcttagctctcctctcacacaaattacctccatttccaaccttccaagctttcaacaat

SEQ ID NO: 299 - DNA, 200 bp, Amaranthus rudis
attgttgaaagcttggaaggttggaaatggaggtaatttgtgtgagaggagagctaagcgaaaatggagaaagggaatcaccgagaaggacgaagagaaatgagtggaggcgcttaacttaactatggttgttctctaattacttaaatacccttgaatatcaagattgatttggattctaaattctttgcttttttttt

SEQ ID NO: 300 - DNA, 200 bp, Amaranthus rudis
tccaaccttccaagctttcaacaatggcgtccacttcttcaaacccaccattttcctattttactaaaccttacaaaatccctaatcgtcaatcctacatttacgctctccctttttccaattctcataaacccacttcttcttcaatcctccgccgcgctcttcaaatctcgtcatcttcttctcaatcacctaaacct

SEQ ID NO: 301 - DNA, 200 bp, Amaranthus rudis
aggtttaggtgattgagaagaagatgacgagatttgaagagcgcggcggaggattgaagaagaagtgggtttatgagaattggaaaaagggagagcgtaaatgtaggattgacgattagggattttgtaaggtttagtaaaataggaaaatggtgggtttgaagaagtggacgccattgttgaaagcttggaaggttgga

SEQ ID NO: 302 - DNA, 200 bp, Amaranthus rudis
atcttcttctcaatcacctaaacctaaacctccttccgctactataactcaatcaccttcatctctcaccgatgataaaccctcttcttttgtttcccgatttagccctgaggaacccagaaaaggttgcgatgttctcgttgaagctcttgaacgtgaaggtgttaccgatgtttttgcttaccctggtggagcttcca

SEQ ID NO: 303 - DNA, 200 bp, Amaranthus rudis
tggaagctccaccagggtaagcaaaaacatcggtaacaccttcacgttcaagagcttcaacgagaacatcgcaaccttttctgggttcctcagggctaaatcgggaaacaaaagaagagggtttatcatcggtgagagatgaaggtgattgagttatagtagcggaaggaggtttaggtttaggtgattgagaagaagat

SEQ ID NO: 304 - DNA, 200 bp, Amaranthus rudis
tttgcttaccctggtggagcttccatggaaatccatcaagctcttactcgttctaatatcattagaaatgttcttcctcgacatgaacaaggtggggttttcgctgctgaaggctacgctcgtgctactggacgtgttggagtttgtattgccacttctggtccgggtgctactaatcttgtttccggttttgctgatgc

SEQ ID NO: 305 - DNA, 200 bp, Amaranthus rudis
gcatcagcaaaaccggaaacaagattagtagcacccggaccagaagtggcaatacaaactccaacacgtccagtagcacgagcgtagccttcagcagcgaaaaccccaccttgttcatgtcgaggaagaacatttctaatgatattagaacgagtaagagcttgatggatttccatggaagctccaccagggtaagcaaa

SEQ ID NO: 306 - DNA, 200 bp, Amaranthus rudis
atcttgtttccggttttgctgatgcacttcttgactcagtcccgcttgtcgccattactgggcaagttcctcggcgtatgattggtactgatgcttttcaagagactcctattgttgaggtaactcgatcaattactaagcataattatttggtgttagatgttgaggatatccctagaattgttaaggaagctttcttt

SEQ ID NO: 307 - DNA, 200 bp, Amaranthus rudis
aaagaaagcttccttaacaattctagggatatcctcaacatctaacaccaaataattatgcttagtaattgatcgagttacctcaacaataggagtctcttgaaaagcatcagtaccaatcatacgccgaggaacttgcccagtaatggcgacaagcgggactgagtcaagaagtgcatcagcaaaaccggaaacaagat

SEQ ID NO: 308 - DNA, 200 bp, Amaranthus rudis
tagaattgttaaggaagctttctttttagctaattctggtagaactgacctgttttgattgatattcctaaagatattcagcaacaattggttgttcctaactgggaacaacccattaaattgggtgggtatctttctaggttgcctaaacccacttattctccttatgaagagggacttcttgatcaaattgtgaggtt

SEQ ID NO: 309 - DNA, 200 bp, Amaranthus rudis
aacctcacaatttgatcaagaagtccctcttcataaggagaataagtgggtttaggcaacctagaaagatacccacccaatttaatgggttgttcccagttaggaacaaccaattgttgctgaatatctttaggaatatcaatcaaaacaggtcagttctaccagaattagctaaaaagaaagcttccttaacaattcta

SEQ ID NO: 310 - DNA, 200 bp, Amaranthus rudis
gacttcttgatcaaattgtgaggttggtggttgaagaagccattgatgaagatggttgaagaattcaaatcaatgttggggttttgaaggttttgttgtgtgccattgatgaagagatttaaggaagaaatcattaatgggtagattgaggaagaaggtgatgaagaagctattgatgaagatggtaacatgttgttcca

SEQ ID NO: 311 - DNA, 200 bp, Amaranthus rudis
tggaacaacatgttaccatcttcatcaatagcttcttcatcaccttcttcctcaatctacccattaatgatttcttccttaaatctcttcatcaatggcacacaacaaaaccttcaaaaccccaacattgatttgaattcttcaaccatcttcatcaatggcttcttcaaccaccaacctcacaatttgatcaagaagtc

SEQ ID NO: 312 - DNA, 200 bp, Amaranthus rudis
atgaagatggtaacatgttgttccaggtaactaaaaccgattgttctttaaaagcggagacccccaaagttcgagtctttaaaagataaacgcaagtttaaacctttaaaagcaaatgagctaaagttcgtacctttagaatcaaattttccaaaataatattaaccatcttatcgatttgcgtgctgaaaaatcggcgc

SEQ ID NO: 313 - DNA, 200 bp, Amaranthus rudis
gcgccgatttttcagcacgcaaatcgataagatggttaatattattttggaaaatttgattctaaaggtacgaactttagctcatttgcttttaaaggtttaaacttgcgtttatcttttaaagactcgaactttgggggtctccgcttttaaagaacaatcggttttagttacctggaacaacatgttaccatcttcat

SEQ ID NO: 314 - DNA, 200 bp, Amaranthus rudis
gatttgcgtgctgaaaaatcggcgcctaaatattcatttcgattgtattttcaaactaggagccctataagaattataattatgtccatatttcaaaaaaaaattacactattaaaaaatttaggaaaaattacctaaaataatccaatcttttattcatttttctagaataatcctaacttttgattaaccatgaataa

SEQ ID NO: 315 - DNA, 200 bp, Amaranthus rudis
ttattcatggttaatcaaaagttaggattattctagaaaaatgaataaaagattggattattttaggtaatttttcctaaattttttaatagtgtaatttttttttgaaatatggacataattataattcttatagggctcctagtttgaaaatacaatcgaaatgaatatttaggcgccgatttttcagcacgcaaatc

SEQ ID NO: 316 - DNA, 200 bp, Amaranthus rudis
aaatttgctgaagcatgtgatataccagcagcccgtgttaccaaggtgagcgatttaagggctgcaattcaaacaatgttggatactccaggaccatatctgctggatgtaatcgtaccacatcaggagcatgtgctgcctatgatccctagcggtgccgccttcaaggacaccatcacagagggtgatggaagaagggc

SEQ ID NO: 317 - DNA, 200 bp, Amaranthus rudis
gcccttcttccatcaccctctgtgatggtgtccttgaaggcggcaccgctagggatcataggcagcacatgctcctgatgtggtacgattacatccagcagatatggtcctggagtatccaacattgtttgaattgcagcccttaaatcgctcaccttggtaacacgggctgctggtatatcacatgcttcagcaaattt

SEQ ID NO: 318 - DNA, 200 bp, Amaranthus rudis
tcacagagggtgatggaagaagggcttattagttggttggagatctttatagaggagaagcttttttgtatgtatgttagtagttccataaacttctatattctctggccgtcctctcgtttagctgtttttatgttagtttattgttttcatgttgcttgttactttgaaaaacccttttgtgttttaagacccattag

SEQ ID NO: 319 - DNA, 200 bp, Amaranthus rudis
ctaatgggtcttaaaacacaaaagggtttttcaaagtaacaagcaacatgaaaacaataaactaacataaaaacagctaaacgagaggacggccagagaatatagaagtttatggaactactaacatacatacaaaaaagcttctcctctataaagatctccaaccaactaataagcccttcttccatcaccctctgtga

SEQ ID NO: 320 - DNA, 200 bp, Amaranthus rudis
ccttttgtgttttaagacccattagcatgaataatcttcctatactattgtatggttcgatacacgctagttgtttctttttattaacgagttaaagacaactattagtcggtgtaatcaagtctgtctcacattgcttgacattttgttctcctttgatgaatttgatattaggaagtttgtttggtactagtgaatct

SEQ ID NO: 321 - DNA, 200 bp, Amaranthus rudis
agattcactagtaccaaacaaacttcctaatatcaaattcatcaaaggagaacaaaatgtcaagcaatgtgagacagacttgattacaccgactaatagttgtctttaactcgttaataaaaagaaacaactagcgtgtatcgaaccatacaatagtataggaagattattcatgctaatgggtcttaaaacacaaaagg

SEQ ID NO: 322 - DNA, 200 bp, Amaranthus rudis
aagtttgtttggtactagtgaatcttcatgtcctatactgttttctcgtcttagcggacattggtattgtatctcttggtgggttttttgtgggtataggagtattcgattcgttgttatgttcgactccttcaatgcttttggtgggtttttcaaagaagaaaaaggaagcaaaaatggccttagaatgtaaagtggtg

SEQ ID NO: 323 - DNA, 200 bp, Amaranthus rudis
caccactttacattctaaggccatttttgcttcctttttcttctttgaaaaacccaccaaaagcattgaaggagtcgaacataacaacgaatcgaatactcctatacccacaaaaaacccaccaagagatacaataccaatgtccgctaagacgagaaaacagtataggacatgaagattcactagtaccaaacaaactt

SEQ ID NO: 324 - DNA, 200 bp, Amaranthus rudis
aacagggaaggccattatgtttcaatcaccaaaattggcccaaatctgaaagagcataggacacgatggtagtaaaaccaggtttataatcagtcaagaaatctaaaacttccaacaatcatacacaaaaccaatggaatcaatattgcagccaattgcagagcgatatgcacaatcatcttcaaaaaagaagctacccg

SEQ ID NO: 325 - DNA, 200 bp, Amaranthus rudis
cgggtagcttcttttttgaagatgattgtgcatatcgctctgcaattggctgcaatattgattccattggttttgtgtatgattgttggaagttttagatttcttgactgattataaacctggttttactaccatcgtgtcctatgctctttcagatttgggccaattttggtgattgaaacataatggccttccctgtt

SEQ ID NO: 326 - DNA, 200 bp, Amaranthus rudis
tcatcttcaaaaaagaagctacccggccctgaacaccactgcaaactgtccttcactgcacaatcatcttcgatgcacattccaacctcatccgccattcttcacattcatagttacccgaccagcctctagttaaaatcctgatgagtaatactgtcaaaccaaatccacgtgaaaaagatgaaagaccacaattgatt

SEQ ID NO: 327 - DNA, 200 bp, Amaranthus rudis
aatcaattgtggtctttcatctttttcacgtggatttggtttgacagtattactcatcaggattttaactagaggctggtcgggtaactatgaatgtgaagaatggcggatgaggttggaatgtgcatcgaagatgattgtgcagtgaaggacagtttgcagtggtgttcagggccgggtagcttcttttttgaagatga

SEQ ID NO: 328 - DNA, 200 bp, Amaranthus rudis
aaaagatgaaagaccacaattgatttgtggtaaaataaataattgggccctgttctttatcttgcaaatacaaccttgtcttctgaaaaagtaggcacaaactccctagagttcggaagaggaacttccttgaaccaaggatgatcaagagcctcttctgcggttatcctcttctcagggtcataggttaatagacggct

SEQ ID NO: 329 - DNA, 200 bp, Amaranthus rudis
agccgtctattaacctatgaccctgagaagaggataaccgcagaagaggctcttgatcatccttggttcaaggaagttcctcttccgaactctagggagtttgtgcctactttttcagaagacaaggttgtatttgcaagataaagaacagggcccaattatttattttaccacaaatcaattgtggtctttcatctttt

SEQ ID NO: 330 - DNA, 200 bp, Amaranthus rudis
cagggtcataggttaatagacggctcaacaaatcaagccccgtgtcagaaagtgcaggagcacctgtaaaagatgtgcgaggaaacttcttatgcaattgattgtacggttggcgaataaagttgaacttgtgcccaggcaattgagaaaatcctggccaaagtttgtcattaggtgtgcccaatgttgcaaacatcttg

SEQ ID NO: 331 - DNA, 200 bp, Amaranthus rudis
caagatgtttgcaacattgggcacacctaatgacaaactttggccaggattttctcaattgcctgggcacaagttcaactttattcgccaaccgtacaatcaattgcataagaagtttcctcgcacatcttttacaggtgctcctgcactttctgacacggggcttgatttgttgagccgtctattaacctatgaccctg

SEQ ID NO: 332 - DNA, 200 bp, Amaranthus rudis
tgtgcccaatgttgcaaacatcttgttaagctgctcaatctcagatttcccatcaaataagggtttattggccaatagttcagccatgatgcaacccacagaccacatatccacagcagttgagtactctgtagctccaagaagaagttcaggagccctgtaccaaagagtaaccaccaaagcagtataaggcttcaacg

SEQ ID NO: 333 - DNA, 200 bp, Amaranthus rudis
cgttgaagccttatactgctttggtggttactctttggtacagggctcctgaacttcttcttggagctacagagtactcaactgctgtggatatgtggtctgtgggttgcatcatggctgaactattggccaataaacccttatttgatgggaaatctgagattgagcagcttaacaagatgtttgcaacattgggcaca

SEQ ID NO: 334 - DNA, 200 bp, Amaranthus rudis
accaaagcagtataaggcttcaacgggctaccatactgacgtgccataccgaagtcgcatatctttagctctcccttgttatttaccaaaagatttgaagtcttcaaatctctatgtagcacccaattatgatgaagatacttcacaccctccaaaagttgaagcattaaacacttaacttcactatatctgaaaggctg

SEQ ID NO: 335 - DNA, 200 bp, Amaranthus rudis
cagcctttcagatatagtgaagttaagtgtttaatgcttcaacttttggagggtgtgaagtatcttcatcataattgggtgctacatagagatttgaagacttcaaatcttttggtaaataacaagggagagctaaagatatgcgacttcggtatggcacgtcagtatggtagcccgttgaagccttatactgctttggt

SEQ ID NO: 336 - DNA, 200 bp, Amaranthus rudis
taacttcactatatctgaaaggctgcttcctagtctgcattaaagccttaagatcatgctctacatgatccatcaccatgtaaatgctatcaaagccatccgggctatcatcaaccactacttctcgaacattcacaattgaaggatgattcaaggacacaagagtattgatttccctcaagtaataaacaggaaacccc

SEQ ID NO: 337 - DNA, 200 bp, Amaranthus rudis
ggggtttcctgtttattacttgagggaaatcaatactcttgtgtccttgaatcatccttcaattgtgaatgttcgagaagtagtggttgatgatagcccggatggctttgatagcatttacatggtgatggatcatgtagagcatgatcttaaggctttaatgcagactaggaagcagcctttcagatatagtgaagtta

SEQ ID NO: 338 - DNA, 200 bp, Amaranthus rudis
cctcaagtaataaacaggaaacccctctctttggtcacccaacttcatcttctttaaggcaacaatctcaccactttcttcatctcttgctttgtacacaataccataacttccttcactaattttattaagcttcttatacttgaacacacttctgcatccctgaagcatatttctatttcctctcccggaaaccccgg

SEQ ID NO: 339 - DNA, 200 bp, Amaranthus rudis
ccggggtttccgggagaggaaatagaaatatgcttcagggatgcagaagtgtgttcaagtataagaagcttaataaaattagtgaaggaagttatggtattgtgtacaaagcaagagatgaagaaagtggtgagattgttgccttaaagaagatgaagttgggtgaccaaagagaggggtttcctgtttattacttgagg

SEQ ID NO: 340 - DNA, 200 bp, Amaranthus rudis
ctatttcctctcccggaaaccccgggctctccaccgtcatcactcgcagcacaatcctcaccatcactcgcatcaacctccatacagtcatctctcttcaaacccaccattttctattttactataccttacaaaatccctaatctgcaatcatccatttacgctatccctttttccgattctcttaaacccacttcttc

SEQ ID NO: 341 - DNA, 200 bp, Amaranthus rudis
gaagaagtgggtttaagagaatcggaaaaagggatagcgtaaatggatgattgcagattagggattttgtaaggtatagtaaaatagaaaatggtgggtttgaagagagatgactgtatggaggttgatgcgagtgatggtgaggattgtgctgcgagtgatgacggtggagagcccggggtttccgggagaggaaatag

SEQ ID NO: 342 - DNA, 200 bp, Amaranthus rudis
ccgattctcttaaacccacttcttcttcttcaatcctccgccgccctcttcaaatctcatcatcttcttctcaatcacctaaacctaaacctccttccgctactataactcaatcaccttcgtctctcacctatgataaaccctcttcttttgtttcccgatttagccctgaagaacccagaaaaggttgcgatgttctc

SEQ ID NO: 343 - DNA, 200 bp, Amaranthus rudis
gagaacatcgcaaccttttctgggttcttcagggctaaatcgggaaacaaaagaagagggtttatcataggtgagagacgaaggtgattgagttatagtagcggaaggaggtttaggtttaggtgattgagaagaagatgatgagatttgaagagggcggcggaggattgaagaagaagaagtgggtttaagagaatcgg

SEQ ID NO: 344 - DNA, 200 bp, Amaranthus rudis
acccagaaaaggttgcgatgttctcgttgaagctcttgaacgtgaaggtgttaccgatgtttttgcttaccctggtggagcatccatggaaattcatcaagctcttactcgttctaatatcattagaaatgttcttcctcgacatgaacaaggtggggttttcgctgctgaaggctacgctcgtgctactggacgtgttg

SEQ ID NO: 345 - DNA, 200 bp, Amaranthus rudis
caacacgtccagtagcacgagcgtagccttcagcagcgaaaaccccaccttgttcatgtcgaggaagaacatttctaatgatattagaacgagtaagagcttgatgaatttccatggatgctccaccagggtaagcaaaaacatcggtaacaccttcacgttcaagagcttcaacgagaacatcgcaaccttttctgggt

SEQ ID NO: 346 - DNA, 200 bp, Amaranthus rudis
tacgctcgtgctactggacgtgttggagtttgtattgccacttctggtccgggtgctactaatcttgtttccggttttgctgatgcacttcttgactcagtcccgcttgtcgccattactgggcaagttcctcggcgtatgattggtactgatgcttttcaagagactcctattgttgaggtaactcgatcaattactaa

SEQ ID NO: 347 - DNA, 200 bp, Amaranthus rudis
ttagtaattgatcgagttacctcaacaataggagtctcttgaaaagcatcagtaccaatcatacgccgaggaacttgcccagtaatggcgacaagcgggactgagtcaagaagtgcatcagcaaaaccggaaacaagattagtagcacccggaccagaagtggcaatacaaactccaacacgtccagtagcacgagcgta

SEQ ID NO: 348 - DNA, 200 bp, Amaranthus rudis
ttgaggtaactcgatcaattactaagcataattatttggtgttagatgttgaggatatccctagaattgttaaggaagctttctttttagctaattctggtagacctggacctgttttgattgatattcctaaagatattcagcaacaattggttgttcctaactgggaacagcccattaaattgggtgggtatctttct

SEQ ID NO: 349 - DNA, 200 bp, Amaranthus rudis
agaaagatacccacccaatttaatgggctgttcccagttaggaacaaccaattgttgctgaatatctttaggaatatcaatcaaaacaggtccaggtctaccagaattagctaaaaagaaagcttccttaacaattctagggatatcctcaacatctaacaccaaataattatgcttagtaattgatcgagttacctcaa

SEQ ID NO: 350 - DNA, 200 bp, Amaranthus rudis
cattaaattgggtgggtatctttctaggttgcctaaacccactttttctgctaatgaagagggacttcttgatcaaattgtgaggttggtgggtgagtctaagagacctgtgctgtatactggaggtgggtgtttgaattctagtgaagaattaaggaaatttgtcgagttgacagggattccggttgctagtactttaa

SEQ ID NO: 351 - DNA, 200 bp, Amaranthus rudis
ttaaagtactagcaaccggaatccctgtcaactcgacaaatttccttaattcttcactagaattcaaacacccacctccagtatacagcacaggtctcttagactcacccaccaacctcacaatttgatcaagaagtccctcttcattagcagaaaaagtgggtttaggcaacctagaaagatacccacccaatttaatg

SEQ ID NO: 352 - DNA, 200 bp, Amaranthus rudis
gggattccggttgctagtactttaatggggttgggggctttcccttgtactgatgatttatcacttcaaatgttgggaatgcacgggactgtgtacgcgaattacgcggtggataaggctgatttgttgcttgctttcggggttaggtttgatgatcgagtgactgggaagctcgaggcgtttgctagccgggctaagat

SEQ ID NO: 353 - DNA, 200 bp, Amaranthus rudis
atcttagcccggctagcaaacgcctcgagcttcccagtcactcgatcatcaaacctaaccccgaaagcaagcaacaaatcagccttatccaccgcgtaattcgcgtacacagtcccgtgcattcccaacatttgaagtgataaatcatcagtacaagggaaagcccccaaccccattaaagtactagcaaccggaatccc

SEQ ID NO: 354 - DNA, 200 bp, Amaranthus rudis
aggcgtttgctagccgggctaagattgtgcacatcgatatcgattctgctgaaatcgggaagaataagcaacctcatgtgtcgatttgtggtgatattaaagtggcattacggggttgaataatattttggaatctagaaaaggaaaggtgaaattggatttctctaattggagggaggaattgaatgagcagaaaaaga

SEQ ID NO: 355 - DNA, 200 bp, Amaranthus rudis
tctttttctgctcattcaattcctccctccaattagagaaatccaatttcacctttccttttctagattccaaaatattattcaaccccgtaatgccactttaatatcaccacaaatcgacacatgaggttgcttattcttcccgatttcagcagaatcgatatcgatgtgcacaatcttagcccggctagcaaacgcct

SEQ ID NO: 356 - DNA, 200 bp, Amaranthus rudis
gaggaattgaatgagcagaaaaagaagtttcctttgagttttaagactttcggggatgcaattcctccgcaatatgccattcaggttctggacgagttgacgaagggtgatgcgattgtaagtaccggtgttgggcagcaccaaatgtgggctgcccaattctataagtaccgaaatcctcgccaatggctgacctcggg

SEQ ID NO: 357 - DNA, 200 bp, Amaranthus rudis
cccgaggtcagccattggcgaggatttcggtacttatagaattgggcagcccacatttggtgctgcccaacaccggtacttacaatcgcatcacccttcgtcaactcgtccagaacctgaatggcatattgcggaggaattgcatccccgaaagtcttaaaactcaaaggaaacttctttttctgctcattcaattcctc

SEQ ID NO: 358 - DNA, 200 bp, Amaranthus rudis
atcctcgccaatggctgacctcgggtggtttgggggctatggggtttggtctaccagccgctattggagctgctgttgctcgaccagatgcggtggttgtagacattgatggggacgggagttttatcatgaatgttcaagagttggctacgattagggtggagaatctcccggttaaaatcatgctcttgaacaatcaa

SEQ ID NO: 359 - DNA, 200 bp, Amaranthus rudis
ttgattgttcaagagcatgattttaaccgggagattctccaccctaatcgtagccaactcttgaacattcatgataaaactcccgtccccatcaatgtctacaaccaccgcatctggtcgagcaacagcagctccaatagcggctggtagaccaaaccccatagcccccaaaccacccgaggtcagccattggcgaggat

SEQ ID NO: 360 - DNA, 200 bp, Amaranthus rudis
taaaatcatgctcttgaacaatcaacatttaggtatggttgttcaattggaagatcgattttacaaagctaaccgggcacatacatacctcggaaatccatccaattcttccgaaatcttcccggatatgctcaaatttgctgaagcatgtgatataccagcagcccgtgttaccaaggtgagcgatttaagggctgcaa

SEQ ID NO: 361 - DNA, 200 bp, Amaranthus rudis
ttgcagcccttaaatcgctcaccttggtaacacgggctgctggtatatcacatgcttcagcaaatttgagcatatccgggaagatttcggaagaattggatggatttccgaggtatgtatgtgcccggttagctttgtaaaatcgatcttccaattgaacaaccatacctaaatgttgattgttcaagagcatgatttta

SEQ ID NO: 362 - DNA, 200 bp, Amaranthus rudis
aaggtgagcgatttaagggctgcaattcaaacaatgttggatactccaggaccatatctgctggatgtaatcgtaccacatcaggagcatgtgctgcctatgatccctagcggtgccgccttcaaggacaccatcacagagggtgatggaagaagggcttattagttggttggagatctttatttggagaagcttttttg

SEQ ID NO: 363 - DNA, 200 bp, Amaranthus rudis
caaaaaagcttctccaaataaagatctccaaccaactaataagcccttcttccatcaccctctgtgatggtgtccttgaaggcggcaccgctagggatcataggcagcacatgctcctgatgtggtacgattacatccagcagatatggtcctggagtatccaacattgtttgaattgcagcccttaaatcgctcacctt

SEQ ID NO: 364 - DNA, 200 bp, Amaranthus rudis
atctttatttggagaagcttttttgtatgtatgttagtagttccataaacttctatattctctggccgttctctcgtttagctgtttttatgttagtttgttgttttcatgttgcttgttactttgaaaaacccttttgtgtttaagacccattagcatgaataatcttcctatactattgtatggttcgatacacgcta

SEQ ID NO: 365 - DNA, 200 bp, Amaranthus rudis
tagcgtgtatcgaaccatacaatagtataggaagattattcatgctaatgggtcttaaacacaaaagggtttttcaaagtaacaagcaacatgaaaacaacaaactaacataaaaacagctaaacgagagaacggccagagaatatagaagtttatggaactactaacatacatacaaaaaagcttctccaaataaagat

SEQ ID NO: 366 - DNA, 200 bp, Amaranthus rudis
ctttctccattttcgcttagctctcctctcacacaaattacctccatttccaaccttccaagctttcaacaatggcgtccacttcttcaaacccaccattttcctattttactaaaccttacaaaatccctaatcgtcaatcctacatttacgctctccctttttccaattctcataaacccacttcttcttcaatcctc

SEQ ID NO: 367 - DNA, 200 bp, Amaranthus rudis
gaggattgaagaagaagtgggtttatgagaattggaaaaagggagagcgtaaatgtaggattgacgattagggattttgtaaggtttagtaaaataggaaaatggtgggtttgaagaagtggacgccattgttgaaagcttggaaggttggaaatggaggtaatttgtgtgagaggagagctaagcgaaaatggagaaag

SEQ ID NO: 368 - DNA, 200 bp, Amaranthus rudis
taaacccacttcttcttcaatcctccgccgcgctcttcaaatctcgtcatcttcttctcaatcacctaaacctaaacctccttccgctactataactcaatcaccttcatctctcaccgatgataaaccctcttcttttgtttcccgatttagccctgaggaacccagaaaaggttgcgatgttctcgttgaagctcttg

SEQ ID NO: 369 - DNA, 200 bp, Amaranthus rudis
caagagcttcaacgagaacatcgcaaccttttctgggttcctcagggctaaatcgggaaacaaaagaagagggtttatcatcggtgagagatgaaggtgattgagttatagtagcggaaggaggtttaggtttaggtgattgagaagaagatgacgagatttgaagagcgcggcggaggattgaagaagaagtgggttta

SEQ ID NO: 370 - DNA, 200 bp, Amaranthus rudis
tgcgatgttctcgttgaagctcttgaacgtgaaggtgttaccgatgtttttgcttaccctggtggagcttccatggaaatccatcaagctcttactcgttctaatatcattagaaatgttcttcctcgacatgaacaaggtggggttttcgctgctgaaggctacgctcgtgctactggacgtgttggagtttgtattgc

SEQ ID NO: 371 - DNA, 200 bp, Amaranthus rudis
gcaatacaaactccaacacgtccagtagcacgagcgtagccttcagcagcgaaaaccccaccttgttcatgtcgaggaagaacatttctaatgatattagaacgagtaagagcttgatggatttccatggaagctccaccagggtaagcaaaaacatcggtaacaccttcacgttcaagagcttcaacgagaacatcgca

SEQ ID NO: 372 - DNA, 200 bp, Amaranthus rudis
ctggacgtgttggagtttgtattgccacttctggtccgggtgctactaatcttgtttccggttttgctgatgcacttcttgactcagtcccgcttgtcgccattactgggcaagttcctcggcgtatgattggtactgatgcttttcaagagactcctattgttgaggtaactcgatcaattactaagcataattatttg

SEQ ID NO: 373 - DNA, 200 bp, Amaranthus rudis
caaataattatgcttagtaattgatcgagttacctcaacaataggagtctcttgaaaagcatcagtaccaatcatacgccgaggaacttgcccagtaatggcgacaagcgggactgagtcaagaagtgcatcagcaaaaccggaaacaagattagtagcacccggaccagaagtggcaatacaaactccaacacgtccag

SEQ ID NO: 374 - DNA, 200 bp, Amaranthus rudis
atcaattactaagcataattatttggtgttagatgttgaggatatccctagaattgttaaggaagctttctttttagctaattctggtagacctggacctgttttgattgatattcctaaagatattcagcaacaattggttgttcctaactgggaacagcccattaaattgggtgggtatctttctaggttgcctaaac

SEQ ID NO: 375 - DNA, 200 bp, Amaranthus rudis
gtttaggcaacctagaaagatacccacccaatttaatgggctgttcccagttaggaacaaccaattgttgctgaatatctttaggaatatcaatcaaaacaggtccaggtctaccagaattagctaaaaagaaagcttccttaacaattctagggatatcctcaacatctaacaccaaataattatgcttagtaattgat

SEQ ID NO: 376 - DNA, 200 bp, Amaranthus rudis
gggtatctttctaggttgcctaaacccactttttctgctaatgaagagggacttcttgatcaaattgtgaggttggtgggtgagtctaagagacctgtgctgtatactggaggtgggtgtttgaattctagtgaagaattaaggaaatttgtcgagttgacagggattccggttgctagtactttaatggggttgggggc

SEQ ID NO: 377 - DNA, 200 bp, Amaranthus rudis
gcccccaaccccattaaagtactagcaaccggaatccctgtcaactcgacaaatttccttaattcttcactagaattcaaacacccacctccagtatacagcacaggtctcttagactcacccaccaacctcacaatttgatcaagaagtccctcttcattagcagaaaaagtgggtttaggcaacctagaaagataccc

SEQ ID NO: 378 - DNA, 200 bp, Amaranthus rudis
ctagtactttaatggggttgggggctttcccttgtactgatgatttatcacttcaaatgttgggaatgcacgggactgtgtacgcgaattacgcggtggataaggctgatttgttgcttgctttcggggttaggtttgatgatcgagtgactgggaagctcgaggcgtttgctagccgggctaagattgtgcacatcgat

SEQ ID NO: 379 - DNA, 200 bp, Amaranthus rudis
atcgatgtgcacaatcttagcccggctagcaaacgcctcgagcttcccagtcactcgatcatcaaacctaaccccgaaagcaagcaacaaatcagccttatccaccgcgtaattcgcgtacacagtcccgtgcattcccaacatttgaagtgataaatcatcagtacaagggaaagcccccaaccccattaaagtactag

SEQ ID NO: 380 - DNA, 200 bp, Amaranthus rudis
ccgggctaagattgtgcacatcgatatcgattctgctgaaatcgggaagaataagcaacctcatgtgtcgatttgtggtgatattaaagtggcattacggggttgaataatattttggaatctagaaaaggaaaggtgaaattggatttctctaattggagggaggaattgaatgagcagaaaaagaagtttcctttgag

SEQ ID NO: 381 - DNA, 200 bp, Amaranthus rudis
ctcaaaggaaacttctttttctgctcattcaattcctccctccaattagagaaatccaatttcacctttccttttctagattccaaaatattattcaaccccgtaatgccactttaatatcaccacaaatcgacacatgaggttgcttattcttcccgatttcagcagaatcgatatcgatgtgcacaatcttagcccgg

SEQ ID NO: 382 - DNA, 200 bp, Amaranthus rudis
agcagaaaaagaagtttcctttgagttttaagactttcggggatgcaattcctccgcaatatgccattcaggttctggacgagttgacgaagggtgatgcgattgtaagtaccggtgttgggcagcaccaaatgtgggctgcccaattctataagtaccgaaatcctcgccaatggctgacctcgggtggtttgggggct

SEQ ID NO: 383 - DNA, 200 bp, Amaranthus rudis
agcccccaaaccacccgaggtcagccattggcgaggatttcggtacttatagaattgggcagcccacatttggtgctgcccaacaccggtacttacaatcgcatcacccttcgtcaactcgtccagaacctgaatggcatattgcggaggaattgcatccccgaaagtcttaaaactcaaaggaaacttctttttctgct

SEQ ID NO: 384 - DNA, 200 bp, Amaranthus rudis
gctgacctcgggtggtttgggggctatggggtttggtctaccagccgctattggagctgctgttgctcgaccagatgcggtggttgtagacattgatggggacgggagttttatcatgaatgttcaagagttggctacgattagggtggagaatctcccggttaaaatcatgctcttgaacaatcaacatttaggtatgg

SEQ ID NO: 385 - DNA, 200 bp, Amaranthus rudis
ccatacctaaatgttgattgttcaagagcatgattttaaccgggagattctccaccctaatcgtagccaactcttgaacattcatgataaaactcccgtccccatcaatgtctacaaccaccgcatctggtcgagcaacagcagctccaatagcggctggtagaccaaaccccatagcccccaaaccacccgaggtcagc

SEQ ID NO: 386 - DNA, 200 bp, Amaranthus rudis
ttgaacaatcaacatttaggtatggttgttcaattggaagatcgattttacaaagctaaccgggcacatacatacctcggaaatccatccaattcttccgaaatcttcccggatatgctcaaatttgctgaagcatgtgatataccagcagcccgtgttaccaaggtgagcgatttaagggctgcaattcaaacaatgtt

SEQ ID NO: 387 - DNA, 200 bp, Amaranthus rudis
aacattgtttgaattgcagcccttaaatcgctcaccttggtaacacgggctgctggtatatcacatgcttcagcaaatttgagcatatccgggaagatttcggaagaattggatggatttccgaggtatgtatgtgcccggttagctttgtaaaatcgatcttccaattgaacaaccatacctaaatgttgattgttcaa

SEQ ID NO: 388 - DNA, 200 bp, Amaranthus rudis
taagggctgcaattcaaacaatgttggatactccaggaccatatctgctggatgtaatcgtaccacatcaggagcatgtgctgcctatgatccctagcggtgccgccttcaaggacaccatcacagagggtgatggaagaagggcttattagttggttggagatctttatttggagaagcttttttgtatgtatgttagt

SEQ ID NO: 389 - DNA, 200 bp, Amaranthus rudis
actaacatacatacaaaaaagcttctccaaataaagatctccaaccaactaataagcccttcttccatcaccctctgtgatggtgtccttgaaggcggcaccgctagggatcataggcagcacatgctcctgatgtggtacgattacatccagcagatatggtcctggagtatccaacattgtttgaattgcagccctta

SEQ ID NO: 390 - DNA, 200 bp, Amaranthus rudis
gaagcttttttgtatgtatgttagtagttccataaacttctatattctctggccgttctctcgtttagctgtttttatgttagtttgttgttttcatgttgcttgttactttgaaaaacccttttgtgtttaagacccattagcatgaataatcttcctatactattgtatggttcgatacacgctagttgtttcttttt

SEQ ID NO: 391 - DNA, 200 bp, Amaranthus rudis
aaaaagaaacaactagcgtgtatcgaaccatacaatagtataggaagattattcatgctaatgggtcttaaacacaaaagggtttttcaaagtaacaagcaacatgaaaacaacaaactaacataaaaacagctaaacgagagaacggccagagaatatagaagtttatggaactactaacatacatacaaaaaagcttc

SEQ ID NO: 392 - DNA, 200 bp, Amaranthus rudis
tataagtaccgaaatcctcgccaatggctgacctcgggtggtttgggggctatggggtttggtctaccagccgctattggagctgctgttgctcgaccagatgcggtggttgtagacattgatggggacgggagttttatcatgaatgttcaagagttggctacgattagggtggagaatctcccggttaaaatcatgct

SEQ ID NO: 393 - DNA, 200 bp, Amaranthus rudis
agcatgattttaaccgggagattctccaccctaatcgtagccaactcttgaacattcatgataaaactcccgtccccatcaatgtctacaaccaccgcatctggtcgagcaacagcagctccaatagcggctggtagaccaaaccccatagcccccaaaccacccgaggtcagccattggcgaggatttcggtacttata

SEQ ID NO: 394 - DNA, 200 bp, Amaranthus rudis
agaatctcccggttaaaatcatgctcttgaacaatcaacatttaggtatggttgttcaatgggaagatcgattttacaaagctaaccgggcacatacatacctcgggaatccttccaaatcttcagaaatcttcccggatatgctgaaatttgctgaagcatgtgatataccagcagcccgtgttaccaaggtgagcgat

SEQ ID NO: 395 - DNA, 200 bp, Amaranthus rudis
atcgctcaccttggtaacacgggctgctggtatatcacatgcttcagcaaatttcagcatatccgggaagatttctgaagatttggaaggattcccgaggtatgtatgtgcccggttagctttgtaaaatcgatcttcccattgaacaaccatacctaaatgttgattgttcaagagcatgattttaaccgggagattct

SEQ ID NO: 396 - DNA, 200 bp, Amaranthus rudis
agcccgtgttaccaaggtgagcgatttaagggctgcaattcaaacaatgttggatactccaggaccatatctgctggatgtaatcgtaccacatcaggagcatgtgctgcctatgatccctagcggtgccgccttcaaggacaccatcacagagggtgatggaagaagggcttattagttggttggagatctttatagag

SEQ ID NO: 397 - DNA, 200 bp, Amaranthus rudis
ctctataaagatctccaaccaactaataagcccttcttccatcaccctctgtgatggtgtccttgaaggcggcaccgctagggatcataggcagcacatgctcctgatgtggtacgattacatccagcagatatggtcctggagtatccaacattgtttgaattgcagcccttaaatcgctcaccttggtaacacgggct

SEQ ID NO: 398 - DNA, 200 bp, Amaranthus rudis
tagttggttggagatctttatagaggagaagcttttttgtatgtatgttagtagttccataaacttctatattctctggccgttctctcgtttagctgtttttatgttagtttgttgttttcatgttgcttgctactttgaaaaacccttttgtgttttagacccattagtatgaataatcttcctatattattgtatgg

SEQ ID NO: 399 - DNA, 200 bp, Amaranthus rudis
ccatacaataatataggaagattattcatactaatgggtctaaaacacaaaagggtttttcaaagtagcaagcaacatgaaaacaacaaactaacataaaaacagctaaacgagagaacggccagagaatatagaagtttatggaactactaacatacatacaaaaaagcttctcctctataaagatctccaaccaacta

SEQ ID NO: 400 - DNA, 200 bp, Amaranthus rudis
ataatcttcctatattattgtatggttcgatacacgctagttgtttctttttattaacgagttaaggacaacaattagtcggtgtaaccaagtttgtctcacattgctcgacgttttgttctcctttgatgaatttgaggagtattagggagtttgtttgatactagtgaatcttcatgtcctatactgttttctcgtct

SEQ ID NO: 401 - DNA, 200 bp, Amaranthus rudis
agacgagaaaacagtataggacatgaagattcactagtatcaaacaaactccctaatactcctcaaattcatcaaaggagaacaaaacgtcgagcaatgtgagacaaacttggttacaccgactaattgttgtccttaactcgttaataaaaagaaacaactagcgtgtatcgaaccatacaataatataggaagattat

SEQ ID NO: 402 - DNA, 200 bp, Amaranthus rudis
catgtcctatactgttttctcgtcttagcggacattggtattgtatctcttggtgggttttttgtgggtataggagtattcgattcgttgttatgttcgactccttcaatgcttttggtgggtttttcaaagaagcaaaaggaagcagaaatggccttagaatgtaaactggtggaatggttaggtacccttcttttttt

SEQ ID NO: 403 - DNA, 200 bp, Amaranthus rudis
aaaaaaagaagggtacctaaccattccaccagtttacattctaaggccatttctgcttccttttgcttctttgaaaaacccaccaaaagcattgaaggagtcgaacataacaacgaatcgaatactcctatacccacaaaaaacccaccaagagatacaataccaatgtccgctaagacgagaaaacagtataggacatg

SEQ ID NO: 404 - DNA, 200 bp, Amaranthus rudis
aatggttaggtacccttctttttttgtgggtgggtgttgccttttatcagccatgtttttatgttcatattttgtggtctttgaggccttatgtttagtgttggtgtctttttcgtcgtattctgtgttccgttctgaaatgtggatctcaaagacatagatgatgaggaagagggtcgggataagtgcagtgttttact

SEQ ID NO: 405 - DNA, 200 bp, Amaranthus rudis
agtaaaacactgcacttatcccgaccctcttcctcatcatctatgtctttgagatccacatttcagaacggaacacagaatacgacgaaaaagacaccaacactaaacataaggcctcaaagaccacaaaatatgaacataaaaacatggctgataaaaggcaacacccacccacaaaaaaagaagggtacctaaccatt

SEQ ID NO: 406 - DNA, 200 bp, Amaranthus rudis
gtcgggataagtgcagtgttttactccaaaagcgagcctagtaaggacggaaacgagtcaacattgcgagatgatacgcgttcgagtaagacatgaaaatctgtctgcctgctcagtgctcacaatggtaaattgtactgtaaatgattgttctgtcatgtgggttttttcatctggaaatgtgtatctaaaatggttct

SEQ ID NO: 407 - DNA, 200 bp, Amaranthus rudis
agaaccattttagatacacatttccagatgaaaaaacccacatgacagaacaatcatttacagtacaatttaccattgtgagcactgagcaggcagacagattttcatgtcttactcgaacgcgtatcatctcgcaatgttgactcgtttccgtccttactaggctcgcttttggagtaaaacactgcacttatcccgac

SEQ ID NO: 408 - DNA, 200 bp, Amaranthus rudis
ggaaatgtgtatctaaaatggttcttgtcagttgattgtatcatcaattcaccgaggattacaccatttgctgcaattttgctcattccatttctaaatttggcctcgggtatttcgtttattaaggctctatttgattctaaagccgattcgcctagtaaattttgggggttcgctcaaaattgttgaaaaaagcccaa

SEQ ID NO: 409 - DNA, 200 bp, Amaranthus rudis
ttgggcttttttcaacaattttgagcgaacccccaaaatttactaggcgaatcggctttagaatcaaatagagccttaataaacgaaatacccgaggccaaatttagaaatggaatgagcaaaattgcagcaaatggtgtaatcctcggtgaattgatgatacaatcaactgacaagaaccattttagatacacatttcc

SEQ ID NO: 410 - DNA, 200 bp, Amaranthus rudis
ctcaaaattgttgaaaaaagcccaaactcaatcataactcgcttttttcgattagcgatcagcggggagattagcaaattatgacattgtctatgaccatcttcataatcactttcggccttcattagttggttcccatctgtcattgtctctacactatccttatatgatcttcatcaccaatgctactactaactaaa

SEQ ID NO: 411 - DNA, 200 bp, Amaranthus rudis
tttagttagtagtagcattggtgatgaagatcatataaggatagtgtagagacaatgacagatgggaaccaactaatgaaggccgaaagtgattatgaagatggtcatagacaatgtcataatttgctaatctccccgctgatcgctaatcgaaaaaagcgagttatgattgagtttgggcttttttcaacaattttgag

SEQ ID NO: 412 - DNA, 200 bp, Amaranthus rudis
atcaccaatgctactactaactaaacctagtagctttcgctaacttgccgttcttcaacaacaaacttccatcttaataactctccgtttctcttgagatcttcaacaacgaactcttttaacctcgtaacattacaatgagttcctttgttaaaatgtttcaataaattccaatgacttcaataagccctaaagacgta

SEQ ID NO: 413 - DNA, 200 bp, Amaranthus rudis
tacgtctttagggcttattgaagtcattggaatttattgaaacattttaacaaaggaactcattgtaatgttacgaggttaaaagagttcgttgttgaagatctcaagagaaacggagagttattaagatggaagtttgttgttgaagaacggcaagttagcgaaagctactaggtttagttagtagtagcattggtgat

SEQ ID NO: 414 - DNA, 200 bp, Amaranthus rudis
gacttcaataagccctaaagacgtataatcacttctaatatcttttaattttttaacgtggtctgatttaatatcttttaatatactattttttttaatcccactctgatatcaattgttgtgaaattaggctcattgtatgctacaaatttgaggggaaaactatgaacaataattctttaacaaacaagaaaaataga

SEQ ID NO: 415 - DNA, 200 bp, Amaranthus rudis
tctatttttcttgtttgttaaagaattattgttcatagttttcccctcaaatttgtagcatacaatgagcctaatttcacaacaattgatatcagagtgggattaaaaaaaatagtatattaaaagatattaaatcagaccacgttaaaaaattaaaagatattagaagtgattatacgtctttagggcttattgaagtc

SEQ ID NO: 416 - DNA, 200 bp, Amaranthus rudis
ttctttaacaaacaagaaaaatagaaagttaaaagataattactcatcaagtaaatcatgtgtactttttattcgtttcttgttgcatatgatgtttgattccaagaaacaatcgaaaacaatcattttattagttgtatcattgataagagtaagattgcgtaccctaaatgagagtcgcttattaagattggggtaat

SEQ ID NO: 417 - DNA, 200 bp, Amaranthus rudis
attaccccaatcttaataagcgactctcatttagggtacgcaatcttactcttatcaatgatacaactaataaaatgattgttttcgattgtttcttggaatcaaacatcatatgcaacaagaaacgaataaaaagtacacatgatttacttgatgagtaattatcttttaactttctatttttcttgtttgttaaagaa

SEQ ID NO: 418 - DNA, 200 bp, Amaranthus rudis
agtcgcttattaagattggggtaatgcaaatgcgggtccctttgggttaggaaattagatgaaagttccttagcgtaaatctttatggttggattgatagtagggccataattaaactttgttgaatgtttgactcaatttctaggaatacttgaacacaaattcttgctataaacggtctatagcatagagggtgtaat

SEQ ID NO: 419 - DNA, 200 bp, Amaranthus rudis
attacaccctctatgctatagaccgtttatagcaagaatttgtgttcaagtattcctagaaattgagtcaaacattcaacaaagtttaattatggccctactatcaatccaaccataaagatttacgctaaggaactttcatctaatttcctaacccaaagggacccgcatttgcattaccccaatcttaataagcgact

SEQ ID NO: 420 - DNA, 200 bp, Amaranthus rudis
tcttccttcttggtgattccctttctccattttcgcttagctctcctctcacacaaattacctccatttccaaccttccaagctttcaacaatggcgtccacttcttcaaacccaccattttctattttactaaaccttacaaaatccctaatcgtcaatcctacatttacgctctccctttttccaattctcataaacc

SEQ ID NO: 421 - DNA, 200 bp, Amaranthus rudis
ggtttatgagaattggaaaaagggagagcgtaaatgtaggattgacgattagggattttgtaaggtttagtaaaatagaaaatggtgggtttgaagaagtggacgccattgttgaaagcttggaaggttggaaatggaggtaatttgtgtgagaggagagctaagcgaaaatggagaaagggaatcaccaagaaggaaga

SEQ ID NO: 422 - DNA, 200 bp, Amaranthus rudis
tccctttttccaattctcataaacccacttcttcttcaatcctccgccgcgctcttcaaatctcatcatcttcttctcaatcacctaaacctaaacctccttccgctactataactcaatcaccttcatctctcaccgatgataaaccctcttcttttgtttccagatttagccctgagaacccagaaaaggttgcgatg

SEQ ID NO: 423 - DNA, 200 bp, Amaranthus rudis
catcgcaaccttttctgggttctcagggctaaatctggaaacaaaagaagagggtttatcatcggtgagagatgaaggtgattgagttatagtagcggaaggaggtttaggtttaggtgattgagaagaagatgatgagatttgaagagcgcggcggaggattgaagaagaagtgggtttatgagaattggaaaaaggga

SEQ ID NO: 424 - DNA, 200 bp, Amaranthus rudis
tgagaacccagaaaaggttgcgatgttctcgttgaagctcttgaacgtgaaggtgttaccgatgtttttgcttaccctggtggagcttccatggaaatccatcaagctcttactcgttctaatatcattagaaatgttcttcctcgacatgaacaaggtggggttttcgctgctgaaggctacgctcgtgctactggacg

SEQ ID NO: 425 - DNA, 200 bp, Amaranthus rudis
cgtccagtagcacgagcgtagccttcagcagcgaaaaccccaccttgttcatgtcgaggaagaacatttctaatgatattagaacgagtaagagcttgatggatttccatggaagctccaccagggtaagcaaaaacatcggtaacaccttcacgttcaagagcttcaacgagaacatcgcaaccttttctgggttctca

SEQ ID NO: 426 - DNA, 200 bp, Amaranthus rudis
aaggctacgctcgtgctactggacgtgttggagtttgtattgccacttctggtccgggtgctactaatcttgtttccggttttgctgatgcacttcttgactcagtcccgcttgtcgccattactgggcaagttcctcggcgtatgattggtactgatgcttttcaagagactcctattgttgaggtaactcgatcaatt

SEQ ID NO: 427 - DNA, 200 bp, Amaranthus rudis
aattgatcgagttacctcaacaataggagtctcttgaaaagcatcagtaccaatcatacgccgaggaacttgcccagtaatggcgacaagcgggactgagtcaagaagtgcatcagcaaaaccggaaacaagattagtagcacccggaccagaagtggcaatacaaactccaacacgtccagtagcacgagcgtagcctt

SEQ ID NO: 428 - DNA, 200 bp, Amaranthus rudis
tattgttgaggtaactcgatcaattactaagcataattatttggtgttagatgttgaggatatccctagaattgttaaggaagctttctttttagctaattctggtagacctggacctgttttgattgatattcctaaagatattcagcaacaattggttgttcctaactgggaacagcccattaaattgggtgggtatc

SEQ ID NO: 429 - DNA, 200 bp, Amaranthus rudis
gatacccacccaatttaatgggctgttcccagttaggaacaaccaattgttgctgaatatctttaggaatatcaatcaaaacaggtccaggtctaccagaattagctaaaaagaaagcttccttaacaattctagggatatcctcaacatctaacaccaaataattatgcttagtaattgatcgagttacctcaacaata

SEQ ID NO: 430 - DNA, 200 bp, Amaranthus rudis
cagcccattaaattgggtgggtatctttctaggttgcctaaacccactttttctgctaatgaagagggacttcttgatcaaattgtgaggttggtgggtgagtctaagagacctgtgctgtatactggaggtgggtgtttgaattctagtgaagaattaaggaaatttgtcgagttgacagggattccggttgctagtac

SEQ ID NO: 431 - DNA, 200 bp, Amaranthus rudis
gtactagcaaccggaatccctgtcaactcgacaaatttccttaattcttcactagaattcaaacacccacctccagtatacagcacaggtctcttagactcacccaccaacctcacaatttgatcaagaagtccctcttcattagcagaaaaagtgggtttaggcaacctagaaagatacccacccaatttaatgggctg

SEQ ID NO: 432 - DNA, 200 bp, Amaranthus rudis
tgacagggattccggttgctagtactttaatggggttgggggctttcccttgtactgatgatttatcacttcaaatgttgggaatgcacgggactgtgtacgcgaattacgcggtggataaggctgatttgttgcttgctttcggggttaggtttgatgatcgagtgactgggaagctcgaggcgtttgctagccgggct

SEQ ID NO: 433 - DNA, 200 bp, Amaranthus rudis
agcccggctagcaaacgcctcgagcttcccagtcactcgatcatcaaacctaaccccgaaagcaagcaacaaatcagccttatccaccgcgtaattcgcgtacacagtcccgtgcattcccaacatttgaagtgataaatcatcagtacaagggaaagcccccaaccccattaaagtactagcaaccggaatccctgtca

SEQ ID NO: 434 - DNA, 200 bp, Amaranthus rudis
tctttctaggttgcctaaacccactttttctgctaatgaagagggacttcttgatcaaattgtgaggttggtgggtgagtctaagagacctgtgctgtatactggaggtgggtgtttgaattctagtgaagaattaaggaaatttgtcgagttgacagggattccggttgctagtactttaatggggttgggggctttcc

SEQ ID NO: 435 - DNA, 200 bp, Amaranthus rudis
ggaaagcccccaaccccattaaagtactagcaaccggaatccctgtcaactcgacaaatttccttaattcttcactagaattcaaacacccacctccagtatacagcacaggtctcttagactcacccaccaacctcacaatttgatcaagaagtccctcttcattagcagaaaaagtgggtttaggcaacctagaaaga

SEQ ID NO: 436 - DNA, 200 bp, Amaranthus rudis
actttaatggggttgggggctttcccttgtactgatgatttatcacttcaaatgttgggaatgcacgggactgtgtacgcgaattacgcggtggataaggctgatttgttgcttgctttcggggttaggtttgatgatcgagtgactgggaagctcgaggcgtttgctagccgggctaagattgtgcacatcgatatcga

SEQ ID NO: 437 - DNA, 200 bp, Amaranthus rudis
tcgatatcgatgtgcacaatcttagcccggctagcaaacgcctcgagcttcccagtcactcgatcatcaaacctaaccccgaaagcaagcaacaaatcagccttatccaccgcgtaattcgcgtacacagtcccgtgcattcccaacatttgaagtgataaatcatcagtacaagggaaagcccccaaccccattaaagt

SEQ ID NO: 438 - DNA, 200 bp, Amaranthus rudis
ttaaagtggcattacgggggttgaataatattttggaatctagaaaaggaaaggtgaaattggatttctctaattggagggaggagttgaatgagcagaaaaagaagtttcctttgagttttaagactttcggggatgcaattcctccgcaatatgccattcaggttctggacgagttgacgaagggtgatgcgattgta

SEQ ID NO: 439 - DNA, 200 bp, Amaranthus rudis
tacaatcgcatcacccttcgtcaactcgtccagaacctgaatggcatattgcggaggaattgcatccccgaaagtcttaaaactcaaaggaaacttctttttctgctcattcaactcctccctccaattagagaaatccaatttcacctttccttttctagattccaaaatattattcaacccccgtaatgccactttaa

SEQ ID NO: 440 - DNA, 200 bp, Amaranthus rudis
gttgacgaagggtgatgcgattgtaagtaccggtgttgggcagcaccaaatgtgggctgcccaattctataagtaccgaaatcctcgccaatggctgacctcgggtggtttgggggctatggggtttggtctaccagccgctattggagctgctgttgctcgaccagatgcggtggttgtagacattgatggggacggga

SEQ ID NO: 441 - DNA, 200 bp, Amaranthus rudis
tcccgtccccatcaatgtctacaaccaccgcatctggtcgagcaacagcagctccaatagcggctggtagaccaaaccccatagcccccaaaccacccgaggtcagccattggcgaggatttcggtacttatagaattgggcagcccacatttggtgctgcccaacaccggtacttacaatcgcatcacccttcgtcaac

SEQ ID NO: 442 - DNA, 200 bp, Amaranthus spinosus
cttccttctcagttattccatttctccattctcgcttagctttcctctctcacaaattacctccatttccaagcttccaagctttcaacaatggcgtccagttcttcaaacccaccattattctattttactaaacttaacaaaatccctaatcggcaatcatccatttacgctatcccgttttctaattctcttaaacc

SEQ ID NO: 443 - DNA, 200 bp, Amaranthus spinosus
ggtttaagagaattagaaaacgggatagcgtaaatggatgattgccgattagggattttgttaagtttagtaaaatagaataatggtgggtttgaagaactggacgccattgttgaaagcttggaagcttggaaatggaggtaatttgtgagagaggaaagctaagcgagaatggagaaatggaataactgagaaggaag

SEQ ID NO: 444 - DNA, 200 bp, Amaranthus spinosus
tcccgttttctaattctcttaaacccacttcttcttcttcaatcctccgccgccctcttcaaatctcatcatcttcttctcaatcacctaaacctaaacctccttccgctactataactcagtcaccttcatctctcaccgatgataaaccctcttcttttgtttcccgatttagccctgaagaacccagaaaaggttgc

SEQ ID NO: 445 - DNA, 200 bp, Amaranthus spinosus
gcaaccttttctgggttcttcagggctaaatcgggaaacaaaagaagagggtttatcatcggtgagagatgaaggtgactgagttatagtagcggaaggaggtttaggtttaggtgattgagaagaagatgatgagatttgaagagggcggcggaggattgaagaagaagaagtgggtttaagagaattagaaaacggga

SEQ ID NO: 446 - DNA, 200 bp, Amaranthus spinosus
ccctgaagaacccagaaaaggttgcgatgttctcgttgaagctcttgaacgtgaaggtgttaccgatgtttttgcttaccctggtggagcatccatggaaatccatcaagctcttactcgttctaatatcattagaaatgttcttcctcgacatgaacaaggtggggttttcgctgctgaaggctacgctcgtgctactg

SEQ ID NO: 447 - DNA, 200 bp, Amaranthus spinosus
cagtagcacgagcgtagccttcagcagcgaaaaccccaccttgttcatgtcgaggaagaacatttctaatgatattagaacgagtaagagcttgatggatttccatggatgctccaccagggtaagcaaaaacatcggtaacaccttcacgttcaagagcttcaacgagaacatcgcaaccttttctgggttcttcaggg

SEQ ID NO: 448 - DNA, 200 bp, Amaranthus spinosus
gctgaaggctacgctcgtgctactggacgcgttggagtttgtattgccacttctggtccaggtgctactaatcttgtctctggtcttgctgatgcacttcttgactcagtcccgcttgtcgccattactgggcaagttccccggcgtatgattggtactgatgcttttcaagagactccaattgttgaggtaactcgatc

SEQ ID NO: 449 - DNA, 200 bp, Amaranthus spinosus
gatcgagttacctcaacaattggagtctcttgaaaagcatcagtaccaatcatacgccggggaacttgcccagtaatggcgacaagcgggactgagtcaagaagtgcatcagcaagaccagagacaagattagtagcacctggaccagaagtggcaatacaaactccaacgcgtccagtagcacgagcgtagccttcagc

SEQ ID NO: 450 - DNA, 200 bp, Amaranthus spinosus
ctccaattgttgaggtaactcgatccattactaagcataattatttggtgttagatgttgaggatattcctagaattgttaaggaagctttctttttagctaattctggtagacctggacctgttttgattgatattcctaaagatattcagcaacaattagttgttcctaattgggaacagcccattaaattgggtggg

SEQ ID NO: 451 - DNA, 200 bp, Amaranthus spinosus
cccacccaatttaatgggctgttcccaattaggaacaactaattgttgctgaatatctttaggaatatcaatcaaaacaggtccaggtctaccagaattagctaaaaagaaagcttccttaacaattctaggaatatcctcaacatctaacaccaaataattatgcttagtaatggatcgagttacctcaacaattggag

SEQ ID NO: 452 - DNA, 200 bp, Amaranthus spinosus
ggaacagcccattaaattgggtgggtatctttctaggttgcctaaacccacttattctgctaatgaagagggacttcttgatcaaattgtaaggttagtgggtgagtctaagagacctgtgctgtatactggaggtgggtgtttgaattctagtgaagaattgaggaaatttgtcaaattgacagggattccggtggcta

SEQ ID NO: 453 - DNA, 200 bp, Amaranthus spinosus
tagccaccggaatccctgtcaatttgacaaatttcctcaattcttcactagaattcaaacacccacctccagtatacagcacaggtctcttagactcacccactaaccttacaatttgatcaagaagtccctcttcattagcagaataagtgggtttaggcaacctagaaagatacccacccaatttaatgggctgttcc

SEQ ID NO: 454 - DNA, 200 bp, Amaranthus spinosus
aaattgacagggattccggtggctagtactttaatggggttgggggctttcccttgtactgatgatttatcacttcatatgctgggaatgcacgggactgtgtatgcgaattacgcggttgataaggccgatttgttgcttgctttcggggttaggtttgatgatcgagtgactggtaagctcgaggcgtttgctagccg

SEQ ID NO: 455 - DNA, 200 bp, Amaranthus spinosus
cggctagcaaacgcctcgagcttaccagtcactcgatcatcaaacctaaccccgaaagcaagcaacaaatcggccttatcaaccgcgtaattcgcatacacagtcccgtgcattcccagcatatgaagtgataaatcatcagtacaagggaaagcccccaaccccattaaagtactagccaccggaatccctgtcaattt

SEQ ID NO: 456 - DNA, 200 bp, Amaranthus spinosus
gtaagctcgaggcgtttgctagccgggctaagattgtgcacatcgatatcgattctgctgaaatcgggaagaataagcaacctcatgtgtcgatttgtggtgatgttaaagtggcattacaggggttgaataagattttggaatctagaaaaggaaaggtgaaattggatttctctaattggagggaggagttgaatgag

SEQ ID NO: 457 - DNA, 200 bp, Amaranthus spinosus
ctcattcaactcctccctccaattagagaaatccaatttcacctttccttttctagattccaaaatcttattcaacccctgtaatgccactttaacatcaccacaaatcgacacatgaggttgcttattcttcccgatttcagcagaatcgatatcgatgtgcacaatcttagcccggctagcaaacgcctcgagcttac

SEQ ID NO: 458 - DNA, 200 bp, Amaranthus spinosus
taattggagggaggagttgaatgagcagaaagagaagtttcctttgagttttaagactttcggggatgcaattcctccgcaatacgccattcaggttcttgacgagttgacgaagggtgatgcggttgtaagtaccggtgttgggcagcaccaaatgtgggctgcccaattctataagtaccgaaatcctcgccaatggc

SEQ ID NO: 459 - DNA, 200 bp, Amaranthus spinosus
gccattggcgaggatttcggtacttatagaattgggcagcccacatttggtgctgcccaacaccggtacttacaaccgcatcacccttcgtcaactcgtcaagaacctgaatggcgtattgcggaggaattgcatccccgaaagtcttaaaactcaaaggaaacttctctttctgctcattcaactcctccctccaatta

SEQ ID NO: 460 - DNA, 200 bp, Amaranthus spinosus
aagtaccgaaatcctcgccaatggctgacctcgggtggtttgggggctatggggtttggtctacctgctgctattggagctgctgttgctcgaccagatgcggtggttgtagacatcgatggggatgggagttttatcatgaatgttcaagagttggctacgattagggtggagaatctcccggttaaaatcatgctctt

SEQ ID NO: 461 - DNA, 200 bp, Amaranthus spinosus
aagagcatgattttaaccgggagattctccaccctaatcgtagccaactcttgaacattcatgataaaactcccatccccatcgatgtctacaaccaccgcatctggtcgagcaacagcagctccaatagcagcaggtagaccaaaccccatagcccccaaaccacccgaggtcagccattggcgaggatttcggtactt

SEQ ID NO: 462 - DNA, 200 bp, Amaranthus spinosus
atctcccggttaaaatcatgctcttgaacaatcaacatttaggtatggttgttcaatgggaagatcgattttacaaagctaaccgggcacatacatacctcgggaatccttccaattcttccgaaatcttcccggatatgctcaaattcgctgaagcatgtgatataccagcagctcgtgttaccaaggtgagcgattta

SEQ ID NO: 463 - DNA, 200 bp, Amaranthus spinosus
taaatcgctcaccttggtaacacgagctgctggtatatcacatgcttcagcgaatttgagcatatccgggaagatttcggaagaattggaaggattcccgaggtatgtatgtgcccggttagctttgtaaaatcgatcttcccattgaacaaccatacctaaatgttgattgttcaagagcatgattttaaccgggagat

SEQ ID NO: 464 - DNA, 200 bp, Amaranthus spinosus
tcgtgttaccaaggtgagcgatttaagggctgcaattcaaacaatgttggatactccaggaccgtatctgctggatgtaatcgtaccacatcaggagcatgtgctgcctatgatccctagcggtgccgccttcaaggacaccatcactgagggtgatggaagaagggcttattagttggttggagatctttatagaggag

SEQ ID NO: 465 - DNA, 200 bp, Amaranthus spinosus
ctcctctataaagatctccaaccaactaataagcccttcttccatcaccctcagtgatggtgtccttgaaggcggcaccgctagggatcataggcagcacatgctcctgatgtggtacgattacatccagcagatacggtcctggagtatccaacattgtttgaattgcagcccttaaatcgctcaccttggtaacacga

SEQ ID NO: 466 - DNA, 200 bp, Amaranthus spinosus
ttggttggagatctttatagaggagaagctttttgtatgtatgttagtagttccataaacttctatattctctggccggtctctcgtgtagctgtttttatgttagtttgttgttttcatgttgcgtgctactttgaaaaaacccttttgtgttttagacccattagcatgaataatcatcctatattattgtatggttc

SEQ ID NO: 467 - DNA, 200 bp, Amaranthus spinosus
gaaccatacaataatataggatgattattcatgctaatgggtctaaaacacaaaagggttttttcaaagtagcacgcaacatgaaaacaacaaactaacataaaaacagctacacgagagaccggccagagaatatagaagtttatggaactactaacatacatacaaaaagcttctcctctataaagatctccaaccaa

SEQ ID NO: 468 - DNA, 200 bp, Amaranthus thunbergii
tctgggtgattccctttctccattctcgcttaactttcctctcacacaaattaccttcatttccaacctttcaagctttcaacaatggcgtccaattcttcaaacccaccatttttctattttactataccttacaaaatccctaatctgcaatcatccatttacgctatccctttttccgattctcttaaacccacttc

SEQ ID NO: 469 - DNA, 200 bp, Amaranthus thunbergii
gaagtgggtttaagagaatcggaaaaagggatagcgtaaatggatgattgcagattagggattttgtaaggtatagtaaaatagaaaaatggtgggtttgaagaattggacgccattgttgaaagcttgaaaggttggaaatgaaggtaatttgtgtgagaggaaagttaagcgagaatggagaaagggaatcacccaga

SEQ ID NO: 470 - DNA, 200 bp, Amaranthus thunbergii
tttccgattctcttaaacccacttcttcttcttcaatcctccgccgccctcttcaaatctcatcatcttcttctcaatcacctaaacctaaacctccttccgctactataactcaatcaccttcgtctctcaccgatgataaaccctcttcttttgtttcccgatttagccctgaagaacccagaaaaggttgcgatgtt

SEQ ID NO: 471 - DNA, 200 bp, Amaranthus thunbergii
aacatcgcaaccttttctgggttcttcagggctaaatcgggaaacaaaagaagagggtttatcatcggtgagagacgaaggtgattgagttatagtagcggaaggaggtttaggtttaggtgattgagaagaagatgatgagatttgaagagggcggcggaggattgaagaagaagaagtgggtttaagagaatcggaaa

SEQ ID NO: 472 - DNA, 200 bp, Amaranthus thunbergii
agaacccagaaaaggttgcgatgttctcgttgaagctcttgaacgtgaaggtgttaccgatgtttttgcttaccctggtggagcatccatggaaattcatcaagctcttactcgttctaatatcattagaaatgttcttcctcgacatgaacaaggtggggttttcgctgctgaaggctacgctcgtgctactggacgcg

SEQ ID NO: 473 - DNA, 200 bp, Amaranthus thunbergii
cgcgtccagtagcacgagcgtagccttcagcagcgaaaaccccaccttgttcatgtcgaggaagaacatttctaatgatattagaacgagtaagagcttgatgaatttccatggatgctccaccagggtaagcaaaaacatcggtaacaccttcacgttcaagagcttcaacgagaacatcgcaaccttttctgggttct

SEQ ID NO: 474 - DNA, 200 bp, Amaranthus thunbergii
ggctacgctcgtgctactggacgcgttggagtttgtattgccacttctggtccaggtgctactaatcttgtttctggtcttgctgatgcacttcttgactcagtccctcttgtcgccattactgggcaagttccccggcgtatgattggtactgatgcttttcaagagactccaattgttgaggtaactcgatccattac

SEQ ID NO: 475 - DNA, 200 bp, Amaranthus thunbergii
gtaatggatcgagttacctcaacaattggagtctcttgaaaagcatcagtaccaatcatacgccggggaacttgcccagtaatggcgacaagagggactgagtcaagaagtgcatcagcaagaccagaaacaagattagtagcacctggaccagaagtggcaatacaaactccaacgcgtccagtagcacgagcgtagcc

SEQ ID NO: 476 - DNA, 200 bp, Amaranthus thunbergii
ttgttgaggtaactcgatccattaccaagcataattatttggtgttagatgttgaggatattcctagaattgttaaggaagctttctttttagctaattctggtagacctggacctgttttgattgatattcctaaagatattcagcaacaattagttgttcctaattgggaacagcccattaaattgggtgggtatctt

SEQ ID NO: 477 - DNA, 200 bp, Amaranthus thunbergii
aagatacccacccaatttaatgggctgttcccaattaggaacaactaattgttgctgaatatctttaggaatatcaatcaaaacaggtccaggtctaccagaattagctaaaaagaaagcttccttaacaattctaggaatatcctcaacatctaacaccaaataattatgcttggtaatggatcgagttacctcaacaa

SEQ ID NO: 478 - DNA, 200 bp, Amaranthus thunbergii
gcccattaaattgggtgggtatctttctaggttgcctaaacccacttattctgctaatgaagagggacttgatcaaattgtaaggttagtgggtgagtctaagagacctgtgctgtatactggaggtgggtgtttgaattctagtgaagaattgaggaaatttgtcgaattgacaggtattccggtggctagtactttaa

SEQ ID NO: 479 - DNA, 200 bp, Amaranthus thunbergii
ttaaagtactagccaccggaatacctgtcaattcgacaaatttcctcaattcttcactagaattcaaacacccacctccagtatacagcacaggtctcttagactcacccactaaccttacaatttgatcaagtccctcttcattagcagaataagtgggtttaggcaacctagaaagatacccacccaatttaatgggc

SEQ ID NO: 480 - DNA, 200 bp, Amaranthus thunbergii
ggtattccggtggctagtactttaatggggttgggggctttcccttgtactgatgatttatgtcttcatatgttgggaatgcacgggactgtgtacgcgaattacgcggttgataaggccgatttgttgcttgcttttggggttaggtttgatgatcgagtgactggtaagctcgaggcgtttgctagccgggctaagat

SEQ ID NO: 481 - DNA, 200 bp, Amaranthus thunbergii
atcttagcccggctagcaaacgcctcgagcttaccagtcactcgatcatcaaacctaaccccaaaagcaagcaacaaatcggccttatcaaccgcgtaattcgcgtacacagtcccgtgcattcccaacatatgaagacataaatcatcagtacaagggaaagcccccaaccccattaaagtactagccaccggaatacc

SEQ ID NO: 482 - DNA, 200 bp, Amaranthus thunbergii
aggcgtttgctagccgggctaagattgtgcacatcgatatcgattctgctgaaatcgggaagaataagcaacctcatgtgtcgatttgtggtgatgttaaagtggcattacaggggttgaataagattttggaatctagaaaaggaaaggtgaaattggatttctctaattggagggaggagttgaatgagcagaaaaag

SEQ ID NO: 483 - DNA, 200 bp, Amaranthus thunbergii
ctttttctgctcattcaactcctccctccaattagagaaatccaatttcacctttccttttctagattccaaaatcttattcaacccctgtaatgccactttaacatcaccacaaatcgacacatgaggttgcttattcttcccgatttcagcagaatcgatatcgatgtgcacaatcttagcccggctagcaaacgcct

SEQ ID NO: 484 - DNA, 200 bp, Amaranthus thunbergii
ggaggagttgaatgagcagaaaaagaagtttcctttgagttttaagactttcggggatgcaattcctccgcaatacgccattcaggttcttgacgagttgacgaagggcgatgcggttgtaagtactggtgttgggcagcaccaaatgtgggctgcccaattctataagtaccgaaatcctcgccaatggctgacctcgg

SEQ ID NO: 485 - DNA, 200 bp, Amaranthus thunbergii
ccgaggtcagccattggcgaggatttcggtacttatagaattgggcagcccacatttggtgctgcccaacaccagtacttacaaccgcatcgcccttcgtcaactcgtcaagaacctgaatggcgtattgcggaggaattgcatccccgaaagtcttaaaactcaaaggaaacttctttttctgctcattcaactcctcc

SEQ ID NO: 486 - DNA, 200 bp, Amaranthus thunbergii
aatcctcgccaatggctgacctcgggtggtttgggggctatggggtttggtctaccagctgctattggagctgctgttgctcgaccagatgcggtggttgtagacattgatggggatgggagttttatcatgaatgttcaagagttggctacgattagggtagagaatctcccggttaaaatcatgctcttgaacaatca

SEQ ID NO: 487 - DNA, 200 bp, Amaranthus thunbergii
tgattgttcaagagcatgattttaaccgggagattctctaccctaatcgtagccaactcttgaacattcatgataaaactcccatccccatcaatgtctacaaccaccgcatctggtcgagcaacagcagctccaatagcagctggtagaccaaaccccatagcccccaaaccacccgaggtcagccattggcgaggatt

SEQ ID NO: 488 - DNA, 200 bp, Amaranthus thunbergii
ttaaaatcatgctcttgaacaatcaacatttaggtatggttgttcaatgggaagatcgattttacaaagctaaccgggcacatacatacctcgggaatccttccaattcttccgaaatcttcccggatatgctcaaatttgctgaagcatgtgatataccagcagcccgtgttaccaaggtgagcgatttaagggctgca

SEQ ID NO: 489 - DNA, 200 bp, Amaranthus thunbergii
tgcagcccttaaatcgctcaccttggtaacacgggctgctggtatatcacatgcttcagcaaatttgagcatatccgggaagatttcggaagaattggaaggattcccgaggtatgtatgtgcccggttagctttgtaaaatcgatcttcccattgaacaaccatacctaaatgttgattgttcaagagcatgattttaa

SEQ ID NO: 490 - DNA, 200 bp, Amaranthus thunbergii
caaggtgagcgatttaagggctgcaattcaaacaatgttggatactccaggaccgtatctgctggatgtaatcgtaccacatcaggagcatgtgctgcctatgatccctagcggtgccgccttcaaggacaccataacagagggtgatggaagaagggcttattagttggttggagatctttatagaggagaatcttttt

SEQ ID NO: 491 - DNA, 200 bp, Amaranthus thunbergii
aaaaagattctcctctataaagatctccaaccaactaataagcccttcttccatcaccctctgttatggtgtccttgaaggcggcaccgctagggatcataggcagcacatgctcctgatgtggtacgattacatccagcagatacggtcctggagtatccaacattgtttgaattgcagcccttaaatcgctcaccttg

SEQ ID NO: 492 - DNA, 200 bp, Amaranthus thunbergii
gatctttatagaggagaatcttttttgtatgtatgttagtagttccataaacttctatattctctggccgttctctcgtttagctgtttttatgttagtttgttgttttcatgttgcttgctactttgaaaaacccttttgtgttttagacccattagcatgaataatcttcctatattattgtatggttcgatacacgc

SEQ ID NO: 493 - DNA, 200 bp, Amaranthus thunbergii
gcgtgtatcgaaccatacaataatataggaagattattcatgctaatgggtctaaaacacaaaagggtttttcaaagtagcaagcaacatgaaaacaacaaactaacataaaaacagctaaacgagagaacggccagagaatatagaagtttatggaactactaacatacatacaaaaaagattctcctctataaagatc

SEQ ID NO: 494 - DNA, 200 bp, Amaranthus viridis; identical to SEQ ID NO: 102

SEQ ID NO: 495 - DNA, 200 bp, Amaranthus viridis; identical to SEQ ID NO: 103

SEQ ID NO: 496 - DNA, 200 bp, Amaranthus viridis; identical to SEQ ID NO: 104

SEQ ID NO: 497 - DNA, 200 bp, Amaranthus viridis; identical to SEQ ID NO: 105

SEQ ID NO: 498 - DNA, 200 bp, Amaranthus viridis; identical to SEQ ID NO: 106

SEQ ID NO: 499 - DNA, 200 bp, Amaranthus viridis; identical to SEQ ID NO: 107

SEQ ID NO: 500 - DNA, 200 bp, Amaranthus viridis; identical to SEQ ID NO: 108

SEQ ID NO: 501 - DNA, 200 bp, Amaranthus viridis; identical to SEQ ID NO: 109

SEQ ID NO: 502 - DNA, 200 bp, Amaranthus viridis; identical to SEQ ID NO: 110

SEQ ID NO: 503 - DNA, 200 bp, Amaranthus viridis; identical to SEQ ID NO: 111

SEQ ID NO: 504 - DNA, 200 bp, Amaranthus viridis; identical to SEQ ID NO: 112

SEQ ID NO: 505 - DNA, 200 bp, Amaranthus viridis; identical to SEQ ID NO: 113

SEQ ID NO: 506 - DNA, 200 bp, Amaranthus viridis
gtcgaattgacaggtattccggtggctagtactttaatggggttgggggctttcccttgtactgatgatttatgtcttcatatgttgggaatgcacgggactgtgtacgcgaattacgcggttgataaggccgatttgttgcttgcttttggggttaggtttgatgatcgagtgactggtaagctcgaggcgtttgctag

SEQ ID NO: 507 - DNA, 200 bp, Amaranthus viridis
ctagcaaacgcctcgagcttaccagtcactcgatcatcaaacctaaccccaaaagcaagcaacaaatcggccttatcaaccgcgtaattcgcgtacacagtcccgtgcattcccaacatatgaagacataaatcatcagtacaagggaaagcccccaaccccattaaagtactagccaccggaatacctgtcaattcgac

SEQ ID NO: 508 - DNA, 200 bp, Amaranthus viridis; identical to SEQ ID NO: 116

SEQ ID NO: 509 - DNA, 200 bp, Amaranthus viridis; identical to SEQ ID NO: 117

SEQ ID NO: 510 - DNA, 200 bp, Amaranthus viridis
ctctaattggagggaggagttgaatgagcagaaaaagaagtttcctttgagttttaagactttcggggatgcaattcctccgcaatacgccattcaggttcttgacgagttgacgaagggcgatgcggttgtaagtactggtgttgggcagcaccaaatgtgggctgcccaattctataagtaccgaaatcctcgccaat

SEQ ID NO: 511 - DNA, 200 bp, Amaranthus viridis
attggcgaggatttcggtacttatagaattgggcagcccacatttggtgctgcccaacaccagtacttacaaccgcatcgcccttcgtcaactcgtcaagaacctgaatggcgtattgcggaggaattgcatccccgaaagtcttaaaactcaaaggaaacttctttttctgctcattcaactcctccctccaattagag

SEQ ID NO: 512 - DNA, 200 bp, Amaranthus viridis; identical to SEQ ID NO: 120

SEQ ID NO: 513 - DNA, 200 bp, Amaranthus viridis; identical to SEQ ID NO: 121

SEQ ID NO: 514 - DNA, 200 bp, Amaranthus viridis; identical to SEQ ID NO: 122

SEQ ID NO: 515 - DNA, 200 bp, Amaranthus viridis; identical to SEQ ID NO: 123

SEQ ID NO: 516 - DNA, 200 bp, Amaranthus viridis; identical to SEQ ID NO: 124

SEQ ID NO: 517 - DNA, 200 bp, Amaranthus viridis; identical to SEQ ID NO: 125

SEQ ID NO: 518 - DNA, 200 bp, Amaranthus viridis
tagttggttggagatctttatagaggagaatcttttttgtatgtatgttagtagttccataaacttctatattctctggccgttctctcgtttagctgtttttatgttagtttgttgttttcatgttgcttgctactttgaaaaacccttttgtgttttagacccattagcatgaataatcttcctatattattgtatgg

SEQ ID NO: 519 - DNA, 200 bp, Amaranthus viridis
ccatacaataatataggaagattattcatgctaatgggtctaaaacacaaaagggtttttcaaagtagcaagcaacatgaaaacaacaaactaacataaaaacagctaaacgagagaacggccagagaatatagaagtttatggaactactaacatacatacaaaaaagattctcctctataaagatctccaaccaacta

SEQ ID NO: 520 - DNA, 200 bp, Amaranthus viridis; identical to SEQ ID NO: 442

SEQ ID NO: 521 - DNA, 200 bp, Amaranthus viridis; identical to SEQ ID NO: 443

SEQ ID NO: 522 - DNA, 200 bp, Amaranthus viridis; identical to SEQ ID NO: 444

SEQ ID NO: 523 - DNA, 200 bp, Amaranthus viridis; identical to SEQ ID NO: 445

SEQ ID NO: 524 - DNA, 200 bp, Amaranthus viridis; identical to SEQ ID NO: 446

SEQ ID NO: 525 - DNA, 200 bp, Amaranthus viridis; identical to SEQ ID NO: 447

SEQ ID NO: 526 - DNA, 200 bp, Amaranthus viridis
gctgaaggctacgctcgtgctactggacgcgttggagtttgtattgccacttctggtccaggtgctactaatcttgtttctggtcttgctgatgcacttcttgactcagtccctcttgtcgccattactgggcaagttccccggcgtatgattggtactgatgcttttcaagagactccaattgttgaggtaactcgatc

SEQ ID NO: 527 - DNA, 200 bp, Amaranthus viridis
gatcgagttacctcaacaattggagtctcttgaaaagcatcagtaccaatcatacgccggggaacttgcccagtaatggcgacaagagggactgagtcaagaagtgcatcagcaagaccagaaacaagattagtagcacctggaccagaagtggcaatacaaactccaacgcgtccagtagcacgagcgtagccttcagc

SEQ ID NO: 528 - DNA, 200 bp, Amaranthus viridis
ctccaattgttgaggtaactcgatccattaccaagcataattatttggtgttagatgttgaggatattcctagaattgttaaggaagctttctttttagctaattctggtagacctggacctgttttgattgatattcctaaagatattcagcaacaattagttgttcctaattgggaacagcccattaaattgggtggg

SEQ ID NO: 529 - DNA, 200 bp, Amaranthus viridis
cccacccaatttaatgggctgttcccaattaggaacaactaattgttgctgaatatctttaggaatatcaatcaaaacaggtccaggtctaccagaattagctaaaaagaaagcttccttaacaattctaggaatatcctcaacatctaacaccaaataattatgcttggtaatggatcgagttacctcaacaattggag

SEQ ID NO: 530 - DNA, 200 bp, Amaranthus viridis
ggaacagcccattaaattgggtgggtatctttctaggttgcctaaacccacttattctgctaatgaagagggacttcttgatcaaattgtaaggttagtgggtgagtctaagagacctgtgctgtatactggaggtgggtgtttgaattctagtgaagaattgaggaaatttgtcgaattgacaggtattccggtggcta

SEQ ID NO: 531 - DNA, 200 bp, Amaranthus viridis
tagccaccggaatacctgtcaattcgacaaatttcctcaattcttcactagaattcaaacacccacctccagtatacagcacaggtctcttagactcacccactaaccttacaatttgatcaagaagtccctcttcattagcagaataagtgggtttaggcaacctagaaagatacccacccaatttaatgggctgttcc

SEQ ID NO: 532 - DNA, 200 bp, Amaranthus viridis
gaattgacaggtattccggtggctagtactttaatggggttgggggctttcccttgtactgatgatttatgtcttcatatgttgggaatgcacgggactgtgtacgcgaattacgcggttgataaggccgatttgttgcttgcttttggggttaggtttgatgatcgagtgactggtaagctcgaggcgtttgctagccg

SEQ ID NO: 533 - DNA, 200 bp, Amaranthus viridis
cggctagcaaacgcctcgagcttaccagtcactcgatcatcaaacctaaccccaaaagcaagcaacaaatcggccttatcaaccgcgtaattcgcgtacacagtcccgtgcattcccaacatatgaagacataaatcatcagtacaagggaaagcccccaaccccattaaagtactagccaccggaatacctgtcaattc

SEQ ID NO: 534 - DNA, 200 bp, Amaranthus viridis; identical to SEQ ID NO: 456

SEQ ID NO: 535 - DNA, 200 bp, Amaranthus viridis; identical to SEQ ID NO: 457

SEQ ID NO: 536 - DNA, 200 bp, Amaranthus viridis
taattggagggaggagttgaatgagcagaaaaagaagtttcctttgagttttaagactttcggggatgcaattcctccgcaatacgccattcaggttcttgacgagttgacgaagggcgatgcggttgtaagtactggtgttgggcagcaccaaatgtgggctgcccaattctataagtaccgaaatcctcgccaatggc

SEQ ID NO: 537 - DNA, 200 bp, Amaranthus viridis
gccattggcgaggatttcggtacttatagaattgggcagcccacatttggtgctgcccaacaccagtacttacaaccgcatcgcccttcgtcaactcgtcaagaacctgaatggcgtattgcggaggaattgcatccccgaaagtcttaaaactcaaaggaaacttctttttctgctcattcaactcctccctccaatta

SEQ ID NO: 538 - DNA, 200 bp, Amaranthus viridis
aagtaccgaaatcctcgccaatggctgacctcgggtggtttgggggctatggggtttggtctaccagctgctattggagctgctgttgctcgaccagatgcggtggttgtagacattgatggggatgggagttttatcatgaatgttcaagagttggctacgattagggtagagaatctcccggttaaaatcatgctctt

SEQ ID NO: 539 - DNA, 200 bp, Amaranthus viridis
aagagcatgattttaaccgggagattctctaccctaatcgtagccaactcttgaacattcatgataaaactcccatccccatcaatgtctacaaccaccgcatctggtcgagcaacagcagctccaatagcagctggtagaccaaaccccatagcccccaaaccacccgaggtcagccattggcgaggatttcggtactt

SEQ ID NO: 540 - DNA, 200 bp, Amaranthus viridis
atctcccggttaaaatcatgctcttgaacaatcaacatttaggtatggttgttcaatgggaagatcgattttacaaagctaaccgggcacatacatacctcgggaatccttccaattcttccgaaatcttcccggatatgctcaaatttgctgaagcatgtgatataccagcagcccgtgttaccaaggtgagcgattta

SEQ ID NO: 541 - DNA, 200 bp, Amaranthus viridis
taaatcgctcaccttggtaacacgggctgctggtatatcacatgcttcagcaaatttgagcatatccgggaagatttcggaagaattggaaggattcccgaggtatgtatgtgcccggttagctttgtaaaatcgatcttcccattgaacaaccatacctaaatgttgattgttcaagagcatgattttaaccgggagat

SEQ ID NO: 542 - DNA, 200 bp, Amaranthus viridis
ccgtgttaccaaggtgagcgatttaagggctgcaattcaaacaatgttggatactccaggaccgtatctgctggatgtaatcgtaccacatcaggagcatgtgctgcctatgatccctagcggtgccgccttcaaggacaccataacagagggtgatggaagaagggcttattagttggttggagatctttatagaggag

SEQ ID NO: 543 - DNA, 200 bp, Amaranthus viridis
ctcctctataaagatctccaaccaactaataagcccttcttccatcaccctctgttatggtgtccttgaaggcggcaccgctagggatcataggcagcacatgctcctgatgtggtacgattacatccagcagatacggtcctggagtatccaacattgtttgaattgcagcccttaaatcgctcaccttggtaacacgg

SEQ ID NO: 544 - DNA, 200 bp, Amaranthus viridis
ttggttggagatctttatagaggagaatcttttttgtatgtatgttagtagttccataaacttctatattctctggccgttctctcgtttagctgtttttatgttagtttgttgttttcatgttgcttgctactttgaaaaacccttttgtgttttagacccattagcatgaataatcttcctatattattgtatggttc

SEQ ID NO: 545 - DNA, 200 bp, Amaranthus viridis
gaaccatacaataatataggaagattattcatgctaatgggtctaaaacacaaaagggtttttcaaagtagcaagcaacatgaaaacaacaaactaacataaaaacagctaaacgagagaacggccagagaatatagaagtttatggaactactaacatacatacaaaaaagattctcctctataaagatctccaaccaa

SEQ ID NO: 546 - DNA, 200 bp, Ambrosia trifida
aaacaaaagaatcgtccgattgtccatcctatgtcgtgaaaaaaaaaagaatagagaaatggtactattgtaaatatatttgagcattcatatggtagcagagccgcccatctgtgttgctattatttcctatatcttctctactattctgtgttgctattatttttagagggtcaaagtatcaaagggtgacgaaccgg

SEQ ID NO: 547 - DNA, 200 bp, Ambrosia trifida
ccggttcgtcaccctttgatactttgaccctctaaaaataatagcaacacagaatagtagagaagatataggaaataatagcaacacagatgggcggctctgctaccatatgaatgctcaaatatatttacaatagtaccatttctctattcttttttttttcacgacataggatggacaatcggacgattcttttgttt

SEQ ID NO: 548 - DNA, 200 bp, Ambrosia trifida
aaagtatcaaagggtgacgaaccggttcgacctccgactacccgtcagaccggccggtccgcttcaaaacggtctaatattctaaacactgcttggtggaaactgaaaataacatccacatgtttttttgacacttcatcattgacacttcttctattataaccagataataataataatcaaacaccaaccctagaaca

SEQ ID NO: 549 - DNA, 200 bp, Ambrosia trifida
tgttctagggttggtgtttgattattattattatctggttataatagaagaagtgtcaatgatgaagtgtcaaaaaaacatgtggatgttattttcagtttccaccaagcagtgtttagaatattagaccgttttgaagcggaccggccggtctgacgggtagtcggaggtcgaaccggttcgtcaccctttgatacttt

SEQ ID NO: 550 - DNA, 200 bp, Ambrosia trifida
ataatcaaacaccaaccctagaacacactcattcaacaatggcggccatctctcccacaaacccttccctcaccaccaaaccgccgtcatcttccgccgccacaccaccaccacgttccaccttcctcccccgtttcacattcccaataacctccacttccccaatacgacaccgtttccacatatccaacgttctctcc

SEQ ID NO: 551 - DNA, 200 bp, Ambrosia trifida
ggagagaacgttggatatgtggaaacggtgtcgtattggggaagtggaggttattgggaatgtgaaacgggggaggaaggtggaacgtggtggtggtgtggcggcggaagatgacggcggtttggtggtgagggaagggtttgtgggagagatggccgccattgttgaatgagtgtgttctagggttggtgtttgattat

SEQ ID NO: 552 - DNA, 200 bp, Ambrosia trifida
cactcattcaacaatggcggccatctctcccacaaacccttccttcaccaccaaaccgccgtcatcttccgccaccacaccaccaccacgttccaccttcctcccccgtttcacattcccaataacctccacttccccaatacgacaccgtttccacatatccaacgttctctccgaccacaaacccaccataacccatt

SEQ ID NO: 553 - DNA, 200 bp, Ambrosia trifida
aatgggttatggtgggtttgtggtcggagagaacgttggatatgtggaaacggtgtcgtattggggaagtggaggttattgggaatgtgaaacgggggaggaaggtggaacgtggtggtggtgtggtggcggaagatgacggcggtttggtggtgaaggaagggtttgtgggagagatggccgccattgttgaatgagtg

SEQ ID NO: 554 - DNA, 200 bp, Ambrosia trifida
gaccacaaacccaccataacccattccccatcaccaaccgacccattcatctcccgttatgccccagaccagccccgtaaaggcgccgacgtcctagtcgaagctttggaacgtgaaggcgtcaccgacgtcttcgcatacccaggaggcgcctcaatggagatccatcaagctctgacccgctccaaaaccatccgaaa

SEQ ID NO: 555 - DNA, 200 bp, Ambrosia trifida
tttcggatggttttggagcgggtcagagcttgatggatctccattgaggcgcctcctgggtatgcgaagacgtcggtgacgccttcacgttccaaagcttcgactaggacgtcggcgcctttacggggctggtctggggcataacgggagatgaatgggtcggttggtgatggggaatgggttatggtgggtttgtggtc

SEQ ID NO: 556 - DNA, 200 bp, Ambrosia trifida
tgacccgctccaaaaccatccgaaacgtccttccccgtcatgaacagggcggcgtcttcgccgccgaaggctacgcacgcgcctccggtcttcctggcgtctgtattgctacctctggtcctggagctacaaacctagtgagtggtcttgctgatgcattattagacagtgttccaatggttgcaataaccggtcaagtt

SEQ ID NO: 557 - DNA, 200 bp, Ambrosia trifida
aacttgaccggttattgcaaccattggaacactgtctaataatgcatcagcaagaccactcactaggtttgtagctccaggaccagaggtagcaatacagacgccaggaagaccggaggcgcgtgcgtagccttcggcggcgaagacgccgccctgttcatgacggggaaggacgtttcggatggttttggagcgggtca

SEQ ID NO: 558 - DNA, 200 bp, Ambrosia trifida
aatggttgcaataaccggtcaagttcctagaagaatgattggtaccgatgcgtttcaagaaacccctattgttgaggtaacacgttccattactaaacataattatttagttttggatgttgaagatattcctagggttgttagggaggctttttatcttgcgtcctcgggtcgacccggtccggttttaattgatgtgc

SEQ ID NO: 559 - DNA, 200 bp, Ambrosia trifida
gcacatcaattaaaaccggaccgggtcgacccgaggacgcaagataaaaagcctccctaacaaccctaggaatatcttcaacatccaaaactaaataattatgtttagtaatggaacgtgttacctcaacaataggggtttcttgaaacgcatcggtaccaatcattcttctaggaacttgaccggttattgcaaccatt

SEQ ID NO: 560 - DNA, 200 bp, Ambrosia trifida
cccggtccggttttaattgatgtgcctaaggatatacagcagcagttggtagtgcctaaatgggatgagcctatgaggttaccgggttatttgtctcggttgccgaaaacggagaataatgggcagttggaacagattgttaggttggttagtgaggcgaagaggccggttttgtatgtagggggtgggtgtttgaattc

SEQ ID NO: 561 - DNA, 200 bp, Ambrosia trifida
gaattcaaacacccaccccctacatacaaaaccggcctcttcgcctcactaaccaacctaacaatctgttccaactgcccattattctccgttttcggcaaccgagacaaataacccggtaacctcataggctcatcccatttaggcactaccaactgctgctgtatatccttaggcacatcaattaaaaccggaccggg

SEQ ID NO: 562 - DNA, 200 bp, Ambrosia trifida
atgtagggggtgggtgtttgaattcggcggatgagttgaggcggtttgtggagttaacggggataccggttgcgagtactttgatggggcttggagcgtatcctgcttcgagtgatttgtcgttacatatgcttgggatgcatgggacggtttatgcgaattatgcggtggataagagtgatttgttgcttgcgtttggg

SEQ ID NO: 563 - DNA, 200 bp, Ambrosia trifida
cccaaacgcaagcaacaaatcactcttatccaccgcataattcgcataaaccgtcccatgcatcccaagcatatgtaacgacaaatcactcgaagcaggatacgctccaagccccatcaaagtactcgcaaccggtatccccgttaactccacaaaccgcctcaactcatccgccgaattcaaacacccaccccctacat

SEQ ID NO: 564 - DNA, 200 bp, Ambrosia trifida
gagtgatttgttgcttgcgtttggggtgaggtttgatgatcgtgtgacggggaagcttgaggcgtttgctagtagggcgaagattgttcatattgatattgattcagcggagattgggaagaataagcagcctcatgtgtcgatttgtggtgatattaaggtcgcgttacaagggcttaacgagattttggaggaaaaga

SEQ ID NO: 565 - DNA, 200 bp, Ambrosia trifida
tcttttcctccaaaatctcgttaagcccttgtaacgcgaccttaatatcaccacaaatcgacacatgaggctgcttattcttcccaatctccgctgaatcaatatcaatatgaacaatcttcgccctactagcaaacgcctcaagcttccccgtcacacgatcatcaaacctcaccccaaacgcaagcaacaaatcactc

SEQ ID NO: 566 - DNA, 200 bp, Ambrosia trifida
cttaacgagattttggaggaaaagaattcggtgactaatcttgatttttcgaattggaggaaggagttggacgagcaaaaggttaagtttccgctgagttttaaaacgtttggtgaagctattcctccgcagtatgccattcaagtgcttgatgagttaacgggtgggaatgcgattattagcactggggtcgggcagca

SEQ ID NO: 567 - DNA, 200 bp, Ambrosia trifida
tgctgcccgaccccagtgctaataatcgcattcccacccgttaactcatcaagcacttgaatggcatactgcggaggaatagcttcaccaaacgttttaaaactcagcggaaacttaaccttttgctcgtccaactccttcctccaattcgaaaaatcaagattagtcaccgaattcttttcctccaaaatctcgttaag

SEQ ID NO: 568 - DNA, 200 bp, Ambrosia trifida
ttattagcactggggtcgggcagcatcagatgtgggcagcccagttttacaaatacaacagacctagacaatggctgacctcgggtggactaggggcaatgggttttgggctgcctgcggctattggggcggctgttgcaagacctgatgcagtagtagttgatatcgatggcgatggaagctttataatgaatgttcaa

SEQ ID NO: 569 - DNA, 200 bp, Ambrosia trifida
ttgaacattcattataaagcttccatcgccatcgatatcaactactactgcatcaggtcttgcaacagccgccccaatagccgcaggcagcccaaaacccattgcccctagtccacccgaggtcagccattgtctaggtctgttgtatttgtaaaactgggctgcccacatctgatgctgcccgaccccagtgctaataa

SEQ ID NO: 570 - DNA, 200 bp, Ambrosia trifida
tggaagctttataatgaatgttcaagagttagcaaccatccgtgttgaaaacctgcctgttaagattatgttacttaacaatcagcatttgggtatggtggttcagtgggaggatcggttttacaaggcgaatcgggctcatacctacttaggaaatccgtcaaaagagtctgaaatattccccaacatgttgaagtttg

SEQ ID NO: 571 - DNA, 200 bp, Ambrosia trifida
caaacttcaacatgttggggaatatttcagactcttttgacggatttcctaagtaggtatgagcccgattcgccttgtaaaaccgatcctcccactgaaccaccatacccaaatgctgattgttaagtaacataatcttaacaggcaggttttcaacacggatggttgctaactcttgaacattcattataaagcttcca

SEQ ID NO: 572 - DNA, 200 bp, Ambrosia trifida
atattccccaacatgttgaagtttgctgaagcgtgtgatataccggctgcccgagtgacccgaaaggcagatctaagagcagctattcagaagatgttggatacacctgggccttacttgttggatgtgatcgtgccacatcaagaacatgtgttgcccatgatcccggctggtggaggtttcatggatgtgatcaccga

SEQ ID NO: 573 - DNA, 200 bp, Ambrosia trifida
tcggtgatcacatccatgaaacctccaccagccgggatcatgggcaacacatgttcttgatgtggcacgatcacatccaacaagtaaggcccaggtgtatccaacatcttctgaatagctgctcttagatctgcctttcgggtcactcgggcagccggtatatcacacgcttcagcaaacttcaacatgttggggaatat

SEQ ID NO: 574 - DNA, 200 bp, Ambrosia trifida
ccctagaacacactcattcaacaatggcagccatctctcccacaaacccttccttcaccaccaaaccgccgtcatcttccgccgccacaccaccaccacgttccaccttcctcccccgtttcacattcccaataacctccacttccccaatacgacaccgtttccacatatccaacgttctctccgaccacaaacccacc

SEQ ID NO: 575 - DNA, 200 bp, Ambrosia trifida
ggtgggtttgtggtcggagagaacgttggatatgtggaaacggtgtcgtattggggaagtggaggttattgggaatgtgaaacgggggaggaaggtggaacgtggtggtggtgtggcggcggaagatgacggcggtttggtggtgaaggaagggtttgtgggagagatggctgccattgttgaatgagtgtgttctaggg

SEQ ID NO: 576 - DNA, 200 bp, Ambrosia trifida
gaaggcgtcaccgacgtcttcgcgtacccaggcggcgcctcagtggagatccaccaagctctgacccgctccacaaccatccgaaacgtccttccccgtcatgaacagggcggcgtcttcgccgccgaaggctacgcacgcgcctccggtcttcctggcgtctgtattgctacctctggtcctggagctacaaacctagt

SEQ ID NO: 577 - DNA, 200 bp, Ambrosia trifida
actaggtttgtagctccaggaccagaggtagcaatacagacgccaggaagaccggaggcgcgtgcgtagccttcggcggcgaagacgccgccctgttcatgacggggaaggacgtttcggatggttgtggagcgggtcagagcttggtggatctccactgaggcgccgcctgggtacgcgaagacgtcggtgacgccttc

SEQ ID NO: 578 - DNA, 200 bp, Ambrosia trifida
ctggtcctggagctacaaacctagtgagtggtcttgctgatgcattattagacagtgttccaatggttgcaataaccggtcaagttcctagaagaatgattggaaccgatgcgtttcaagaaacccctattgttgaggtaacacgttccattactaaacataattatttagttttggatgtggaagatattcctagggtt

SEQ ID NO: 579 - DNA, 200 bp, Ambrosia trifida
aaccctaggaatatcttccacatccaaaactaaataattatgtttagtaatggaacgtgttacctcaacaataggggtttcttgaaacgcatcggttccaatcattcttctaggaacttgaccggttattgcaaccattggaacactgtctaataatgcatcagcaagaccactcactaggtttgtagctccaggaccag

SEQ ID NO: 580 - DNA, 200 bp, Ambrosia trifida
ggatgtggaagatattcctagggttgttagggaggctttttatcttgcgtcttcgggtcggcccggtccggttttaattgatgtgcctaaggatatacagcagcagttggtagtgcctaaatgggatgagcctatgaggttaccgggttatttgtctcggttgccgaaaacggagaataatgggcagttggaacagattg

SEQ ID NO: 581 - DNA, 200 bp, Ambrosia trifida
caatctgttccaactgcccattattctccgttttcggcaaccgagacaaataacccggtaacctcataggctcatcccatttaggcactaccaactgctgctgtatatccttaggcacatcaattaaaaccggaccgggccgacccgaagacgcaagataaaaagcctccctaacaaccctaggaatatcttccacatcc

SEQ ID NO: 582 - DNA, 200 bp, Ambrosia trifida
aataatgggcagttggaacagattgttaggttggttagtgaggcgaagaggccggttttgtatgtagggggtgggtgtttgaattcggcggatgagttgaggcggtttgtggagttaacggggataccggttgcgagtactttgatggggcttggagcgtatcctgcttcgagtgatttgtcgttacatatgcttgggat

SEQ ID NO: 583 - DNA, 200 bp, Ambrosia trifida
atcccaagcatatgtaacgacaaatcactcgaagcaggatacgctccaagccccatcaaagtactcgcaaccggtatccccgttaactccacaaaccgcctcaactcatccgccgaattcaaacacccaccccctacatacaaaaccggcctcttcgcctcactaaccaacctaacaatctgttccaactgcccattatt

SEQ ID NO: 584 - DNA, 200 bp, Ambrosia trifida
atttgtcgttacatatgcttgggatgcatgggacggtttatgcgaattatgcggttgataagagtgatttgttgcttgcgtttggggtgaggtttgatgatcgtgtgacggggaagcttgaggcgtttgctagtagggcgaagattgttcatattgatattgattcagcggagattgggaagaataagcagcctcatgtg

SEQ ID NO: 585 - DNA, 200 bp, Ambrosia trifida
cacatgaggctgcttattcttcccaatctccgctgaatcaatatcaatatgaacaatcttcgccctactagcaaacgcctcaagcttccccgtcacacgatcatcaaacctcaccccaaacgcaagcaacaaatcactcttatcaaccgcataattcgcataaaccgtcccatgcatcccaagcatatgtaacgacaaat

SEQ ID NO: 586 - DNA, 200 bp, Ambrosia trifida
tgggaagaataagcagcctcatgtgtcgatttgtggtgatattaaggtcgcgttacaagggcttaacgagattttggaggaaaagaattcggtgactaatcttgatttttcgaattggaggaaggagttggacgaacaaaaggttaagtttccgctgagttttaaaacgtttggtgaagctattcctccgcagtatgcca

SEQ ID NO: 587 - DNA, 200 bp, Ambrosia trifida
tggcatactgcggaggaatagcttcaccaaacgttttaaaactcagcggaaacttaaccttttgttcgtccaactccttcctccaattcgaaaaatcaagattagtcaccgaattcttttcctccaaaatctcgttaagcccttgtaacgcgaccttaatatcaccacaaatcgacacatgaggctgcttattcttccca

SEQ ID NO: 588 - DNA, 200 bp, Ambrosia trifida
gaagctattcctccgcagtatgccattcaagtgcttgatgagttaacgggtgggaatgcgattattagcactggggtcgggcagcatcagatgtgggcagcccagttttacaaatacaacagacctagacaatggctgacctcgggtggactaggggcaatgggttttgggctgcctgcggctattggggcggctgttgc

SEQ ID NO: 589 - DNA, 200 bp, Ambrosia trifida
gcaacagccgccccaatagccgcaggcagcccaaaacccattgcccctagtccacccgaggtcagccattgtctaggtctgttgtatttgtaaaactgggctgcccacatctgatgctgcccgaccccagtgctaataatcgcattcccacccgttaactcatcaagcacttgaatggcatactgcggaggaatagcttc

SEQ ID NO: 590 - DNA, 200 bp, Ambrosia trifida
ctgcggctattggggcggctgttgcaagacctgatgcggtagtagttgatatcgatggcgatggaagctttataatgaatgttcaagagttagcaaccatccgtgttgaaaacctgcctgttaagattatgttacttaacaatcagcatttgggtatggtggttcagtgggaggatcggttttacaaggcgaatcgggct

SEQ ID NO: 591 - DNA, 200 bp, Ambrosia trifida
agcccgattcgccttgtaaaaccgatcctcccactgaaccaccatacccaaatgctgattgttaagtaacataatcttaacaggcaggttttcaacacggatggttgctaactcttgaacattcattataaagcttccatcgccatcgatatcaactactaccgcatcaggtcttgcaacagccgccccaatagccgcag

SEQ ID NO: 592 - DNA, 200 bp, Ambrosia trifida
tcggttttacaaggcgaatcgggctcatacctacttaggaaatccgtcaaaagagtctgaaatattccccaacatgttgaagtttgctgaagcgtgtgatataccggctgcccgagtgacccgaaaggcagatctaagagcagctattcagaagatgttggatacacctgggccttacttgttggatgtgatcgtgccac

SEQ ID NO: 593 - DNA, 200 bp, Ambrosia trifida
gtggcacgatcacatccaacaagtaaggcccaggtgtatccaacatcttctgaatagctgctcttagatctgcctttcgggtcactcgggcagccggtatatcacacgcttcagcaaacttcaacatgttggggaatatttcagactcttttgacggatttcctaagtaggtatgagcccgattcgccttgtaaaaccga

SEQ ID NO: 594 - DNA, 200 bp, Ambrosia trifida
tacttgttggatgtgatcgtgccacatcaagaacatgtgttgcccatgatcccggctggtggaggtttcatggatgtgatcaccgaaggcgatggcagaacgaaatactaagcttcaaagtcgcatcgcatatatagtgtgttatgtaagcagtttgtcggttttgaatgttttgttttgttgtgtaatttagtttctgg

SEQ ID NO: 595 - DNA, 200 bp, Ambrosia trifida
ccagaaactaaattacacaacaaaacaaaacattcaaaaccgacaaactgcttacataacacactatatatgcgatgcgactttgaagcttagtatttcgttctgccatcgccttcggtgatcacatccatgaaacctccaccagccgggatcatgggcaacacatgttcttgatgtggcacgatcacatccaacaagta

SEQ ID NO: 596 - DNA, 200 bp, Ambrosia trifida
ttttgttgtgtaatttagtttctggttatgaatgttatggatcagtttgtcaacgtttctttaatttaatagctttcatgaataaatttcaaagatttatcttctgttttatgtttatattgaagaccaaagttatgtttatgttacacaccagtgaacatgttttctaaaggtcatatgttgttttctataattccaaa

SEQ ID NO: 597 - DNA, 200 bp, Ambrosia trifida
tttggaattatagaaaacaacatatgacctttagaaaacatgttcactggtgtgtaacataaacataactttggtcttcaatataaacataaaacagaagataaatctttgaaatttattcatgaaagctattaaattaaagaaacgttgacaaactgatccataacattcataaccagaaactaaattacacaacaaaa

SEQ ID NO: 598 - DNA, 200 bp, Ambrosia trifida
atatgttgttttctataattccaaaagagtagtttggtgatccgtctctttcagtccatttgtgctctcagttgtgtagatgtcgattatgtatggtcactctgtgctttacattgttgtaccaggtttgaagggtgagtgttcctccacgtttctacctaaattctctcggcggcgcttccatttgtggtggcgttcac

SEQ ID NO: 599 - DNA, 200 bp, Ambrosia trifida
gtgaacgccaccacaaatggaagcgccgccgagagaatttaggtagaaacgtggaggaacactcacccttcaaacctggtacaacaatgtaaagcacagagtgaccatacataatcgacatctacacaactgagagcacaaatggactgaaagagacggatcaccaaactactcttttggaattatagaaaacaacatat

SEQ ID NO: 600 - DNA, 200 bp, Ambrosia trifida
cgcttccatttgtggtggcgttcacggcggttctttaactcatactttaacgttcacctgatgtaatcaaatgttaattactaacgcttttatgtctctttcctctacatcaattataacatgtatttattgcccccttttgttcttagctttaatctatactattaatgtatctggtattaagccttaggtatgaaatt

SEQ ID NO: 601 - DNA, 200 bp, Ambrosia trifida
aatttcatacctaaggcttaataccagatacattaatagtatagattaaagctaagaacaaaagggggcaataaatacatgttataattgatgtagaggaaagagacataaaagcgttagtaattaacatttgattacatcaggtgaacgttaaagtatgagttaaagaaccgccgtgaacgccaccacaaatggaagcg

SEQ ID NO: 602 - DNA, 200 bp, Ambrosia trifida
ggtattaagccttaggtatgaaatttctttcccaaagctgtgcatcgcgaatgcttttagattaatatgttggtttatgtattatgttttcaaggactaaatttacatctgatgcaatgtatacatggttagcaaggtttacaccaaaacatgcagacagattaattaagtaagatgttaaccttgaaaacatatgcaat

SEQ ID NO: 603 - DNA, 200 bp, Ambrosia trifida
attgcatatgttttcaaggttaacatcttacttaattaatctgtctgcatgttttggtgtaaaccttgctaaccatgtatacattgcatcagatgtaaatttagtccttgaaaacataatacataaaccaacatattaatctaaaagcattcgcgatgcacagctttgggaaagaaatttcatacctaaggcttaatacc

SEQ ID NO: 604 - DNA, 200 bp, Ambrosia trifida
gaccgacgtcttcgcctacccagacggcgcctcaatggagatacaccaacttctcacccgctccaccactatccgaaacgtcctccggtcacatcctgagatcgtgaacgggtaaatatttgattttctttattataatcatgttatataataattatatcatttaaataacatcgactgattctctattcgtatgtttt

SEQ ID NO: 605 - DNA, 200 bp, Ambrosia trifida
aaaacatacgaatagagaatcagtcgatgttatttaaatgatataattattatataacatgattataataaagaaaatcaaatatttacccgttcacgatctcaggatgtgaccggaggacgtttcggatagtggtggagcgggtgagaagttggtgtatctccattgaggcgccgtctgggtaggcgaagacgtcggtc

SEQ ID NO: 606 - DNA, 200 bp, Ambrosia trifida
tccgaaacgtccttccccgtcatgaacagggcggcgtcttcgccgccgaaggctacgcacgcgcctccggtcttcctggcgtctgtattgctacctctggtcctggagctacaaacctagtgagtggtcttgctgatgcattattagacagtgttccaatggttgcaataaccggtcaagttcctagaagaatgattggt

SEQ ID NO: 607 - DNA, 200 bp, Ambrosia trifida
accaatcattcttctaggaacttgaccggttattgcaaccattggaacactgtctaataatgcatcagcaagaccactcactaggtttgtagctccaggaccagaggtagcaatacagacgccaggaagaccggaggcgcgtgcgtagccttcggcggcgaagacgccgccctgttcatgacggggaaggacgtttcgga

SEQ ID NO: 608 - DNA, 200 bp, Ambrosia trifida
tcaagttcctagaagaatgattggtaccgatgcgtttcaagaaacccctattgttgaggtaacacgttccattactaaacataattatttagttttggatgttgaagatattcctagggttgttagggaggctttttatcttgcgtcttcgggtcggcccggtccggttttaattgatgtgcctaaggatatacagcagc

SEQ ID NO: 609 - DNA, 200 bp, Ambrosia trifida
gctgctgtatatccttaggcacatcaattaaaaccggaccgggccgacccgaagacgcaagataaaaagcctccctaacaaccctaggaatatcttcaacatccaaaactaaataattatgtttagtaatggaacgtgttacctcaacaataggggtttcttgaaacgcatcggtaccaatcattcttctaggaacttga

SEQ ID NO: 610 - DNA, 200 bp, Ambrosia trifida
gatgtgcctaaggatatacagcagcagttggtagtgcctaaatgggatgagcctatgaggttaccgggttatttgtctcggttgccgaaaacggagaataatgggcagttggaacagattgttaggttggttagtgaggcgaagaggccggttttgtatgtagggggtgggtgtttgaattcggcggatgagttgaggcg

SEQ ID NO: 611 - DNA, 200 bp, Ambrosia trifida
cgcctcaactcatccgccgaattcaaacacccaccccctacatacaaaaccggcctcttcgcctcactaaccaacctaacaatctgttccaactgcccattattctccgttttcggcaaccgagacaaataacccggtaacctcataggctcatcccatttaggcactaccaactgctgctgtatatccttaggcacatc

SEQ ID NO: 612 - DNA, 200 bp, Ambrosia trifida
tgaattcggcggatgagttgaggcggtttgtggagttaacggggataccggttgcgagtactttgatggggcttggagcgtatcctgcttcgagtgatttgtcgttacatatgcttgggatgcatgggacggtttatgcgaattatgcggttgataagagtgatttgttgcttgcgtttggggtgaggtttgatgatcgt

SEQ ID NO: 613 - DNA, 200 bp, Ambrosia trifida
acgatcatcaaacctcaccccaaacgcaagcaacaaatcactcttatcaaccgcataattcgcataaaccgtcccatgcatcccaagcatatgtaacgacaaatcactcgaagcaggatacgctccaagccccatcaaagtactcgcaaccggtatccccgttaactccacaaaccgcctcaactcatccgccgaattca

SEQ ID NO: 614 - DNA, 200 bp, Ambrosia trifida
gtttggggtgaggtttgatgatcgtgtgacggggaagcttgaggcgtttgctagtagggcgaagattgttcatattgatattgattcagcggagattgggaagaataagcagcctcatgtgtcgatttgtggtgatattaaggtcgcgttacaagggcttaacgagattttggaggaaaagaattcggtgactaatcttg

SEQ ID NO: 615 - DNA, 200 bp, Ambrosia trifida
caagattagtcaccgaattcttttcctccaaaatctcgttaagcccttgtaacgcgaccttaatatcaccacaaatcgacacatgaggctgcttattcttcccaatctccgctgaatcaatatcaatatgaacaatcttcgccctactagcaaacgcctcaagcttccccgtcacacgatcatcaaacctcaccccaaac

SEQ ID NO: 616 - DNA, 200 bp, Ambrosia trifida
gaaaagaattcggtgactaatcttgatttttcgaattggaggaaggagttggacgagcaaaaggttaagtttccgctgagttttaaaacgtttggtgaagctattcctccgcagtatgccattcaagtgcttgatgagttaacgggtgggaatgcgattattagcactggggtcgggcagcatcagatgtgggcagccca

SEQ ID NO: 617 - DNA, 200 bp, Ambrosia trifida
tgggctgcccacatctgatgctgcccgaccccagtgctaataatcgcattcccacccgttaactcatcaagcacttgaatggcatactgcggaggaatagcttcaccaaacgttttaaaactcagcggaaacttaaccttttgctcgtccaactccttcctccaattcgaaaaatcaagattagtcaccgaattcttttc

SEQ ID NO: 618 - DNA, 200 bp, Ambrosia trifida
ggcagcatcagatgtgggcagcccagttttacaaatacaacaaacctagacaatggctgacctcgggtggactaggggcaatgggttttgggctgcctgcggctattggggcggctgttgcaagacctgatgcggtagtagttgatatcgatggcgatggaagctttataatgaatgttcaagagttagcaaccatccgt

SEQ ID NO: 619 - DNA, 200 bp, Ambrosia trifida
acggatggttgctaactcttgaacattcattataaagcttccatcgccatcgatatcaactactaccgcatcaggtcttgcaacagccgccccaatagccgcaggcagcccaaaacccattgcccctagtccacccgaggtcagccattgtctaggtttgttgtatttgtaaaactgggctgcccacatctgatgctgcc

SEQ ID NO: 620 - DNA, 200 bp, Ambrosia trifida
tgttcaagagttagcaaccatccgtgttgaaaacctgcctgttaagattatgttacttaacaatcagcatttgggtatggtggttcagtgggaggatcggttttgcaaggcgaatcgggctcatagctacttaggaaatccgtcaaaagagtctgaaatattccccaacatgttgaagtttgccgaagcatgtgatatac

SEQ ID NO: 621 - DNA, 200 bp, Ambrosia trifida
gtatatcacatgcttcggcaaacttcaacatgttggggaatatttcagactcttttgacggatttcctaagtagctatgagcccgattcgccttgcaaaaccgatcctcccactgaaccaccatacccaaatgctgattgttaagtaacataatcttaacaggcaggttttcaacacggatggttgctaactcttgaaca

SEQ ID NO: 622 - DNA, 200 bp, Ambrosia trifida
aagtttgccgaagcatgtgatataccggctgcccgagtgacccgaaaggcagatctaagagcagctattcagaagatgttggatacacctgggccttacttgttggatgtgatcgtgccacatcaagaacatgtgttgcccatgatcccggctggtggaggtttcatggatgtgatcaccgaaggcgatggcagaacgaa

SEQ ID NO: 623 - DNA, 200 bp, Ambrosia trifida
ttcgttctgccatcgccttcggtgatcacatccatgaaacctccaccagccgggatcatgggcaacacatgttcttgatgtggcacgatcacatccaacaagtaaggcccaggtgtatccaacatcttctgaatagctgctcttagatctgcctttcgggtcactcgggcagccggtatatcacatgcttcggcaaactt

SEQ ID NO: 624 - DNA, 200 bp, Ambrosia trifida
tcaccgaaggcgatggcagaacgaaatactaagcttcaaagtcgcatcgcatatatagtgtgttatgtaagcagtttgtcggttttgaatgttttgttgtgtaatttagtttctggttatgaatgttatggatcagtttgtcaacgtttctttaatttaatagctttcatgaataaatttcaaagatttatcttctgttt

SEQ ID NO: 625 - DNA, 200 bp, Ambrosia trifida
aaacagaagataaatctttgaaatttattcatgaaagctattaaattaaagaaacgttgacaaactgatccataacattcataaccagaaactaaattacacaacaaaacattcaaaaccgacaaactgcttacataacacactatatatgcgatgcgactttgaagcttagtatttcgttctgccatcgccttcggtga

SEQ ID NO: 626 - DNA, 200 bp, Ambrosia trifida
aatttcaaagatttatcttctgttttatgtttatattgaagaccaaagttatgtttatgttagtgaccagtgaacatgttttctaaaggtcatatgttgttttctataattccaagagttgtttggtgatccgtctctttcagtccatttgtgctctcagttgtgtagatgtcgattatgtatggtcaatagattgtact

SEQ ID NO: 627 - DNA, 200 bp, Ambrosia trifida
agtacaatctattgaccatacataatcgacatctacacaactgagagcacaaatggactgaaagagacggatcaccaaacaactcttggaattatagaaaacaacatatgacctttagaaaacatgttcactggtcactaacataaacataactttggtcttcaatataaacataaaacagaagataaatctttgaaatt

SEQ ID NO: 628 - DNA, 200 bp, Ambrosia trifida
ttatgtatggtcaatagattgtactctgtgctttaccaggtttgaagggtgagtgttcctccacgtttctacctaaattctctcggcggcgcttccatttgtggtggcggtttctactcttaactcatacttaaacgttcacctgatgtaatctatactattaatatatctggtattaagccttaggtatgaaatttctt

SEQ ID NO: 629 - DNA, 200 bp, Ambrosia trifida
aagaaatttcatacctaaggcttaataccagatatattaatagtatagattacatcaggtgaacgtttaagtatgagttaagagtagaaaccgccaccacaaatggaagcgccgccgagagaatttaggtagaaacgtggaggaacactcacccttcaaacctggtaaagcacagagtacaatctattgaccatacataa

SEQ ID NO: 630 - DNA, 200 bp, Chenopodium album
cctccgccgccctctccaaatctccgcctctcaatccgctaaccccaaacctccatccgctactcaaaccgctgttccatcccctctcactgacgaaaacccccaatctttcgtttcccgatttgcccctgatgaacccagaaaagggtgtgatgttcttgttgaagctttggagcgtgaaggtgttaccaatgtgtttg

SEQ ID NO: 631 - DNA, 200 bp, Chenopodium album
caaacacattggtaacaccttcacgctccaaagcttcaacaagaacatcacacccttttctgggttcatcaggggcaaatcgggaaacgaaagattgggggttttcgtcagtgagaggggatggaacagcggtttgagtagcggatggaggtttggggttagcggattgagaggcggagatttggagagggcggcggagg

SEQ ID NO: 632 - DNA, 200 bp, Chenopodium album
cgtgaaggtgttaccaatgtgtttgcttaccctggtggtgcatcaatggagatccatcaagctctcacgcgctctacctcgatcaggaacgtcctcccccggcacgagcaaggtggggttttcgctgcggaagggtatgctcgagctactgggcgcgtgggtgtgtgcattgcaacctctggtcctggtgccactaatct

SEQ ID NO: 633 - DNA, 200 bp, Chenopodium album
agattagtggcaccaggaccagaggttgcaatgcacacacccacgcgcccagtagctcgagcatacccttccgcagcgaaaaccccaccttgctcgtgccgggggaggacgttcctgatcgaggtagagcgcgtgagagcttgatggatctccattgatgcaccaccagggtaagcaaacacattggtaacaccttcacg

SEQ ID NO: 634 - DNA, 200 bp, Chenopodium album
cctctggtcctggtgccactaatcttgtatcgggtctcgctgatgcgctgcttgattctgtccctttggttgcgatcactggtcaggtgcctcgccgaatgattggaactgatgcatttcaggagactcctattgttgaggttactcgttctatcactaagcataattatttggttttagatgttgaggatattcctaga

SEQ ID NO: 635 - DNA, 200 bp, Chenopodium album
tctaggaatatcctcaacatctaaaaccaaataattatgcttagtgatagaacgagtaacctcaacaataggagtctcctgaaatgcatcagttccaatcattcggcgaggcacctgaccagtgatcgcaaccaaagggacagaatcaagcagcgcatcagcgagacccgatacaagattagtggcaccaggaccagagg

SEQ ID NO: 636 - DNA, 200 bp, Chenopodium album
tttagatgttgaggatattcctagagttgttaaggaagcgtttttatttagctaattctggtaggcctggacctgttttgattgatattcctaaagatattcagcaacaattggttgtgcctaattgggatcagcctattaagcttggtgggtatgtttctaggctgccaaaatcgaagttttcggcgaatgaggaaggg

SEQ ID NO: 637 - DNA, 200 bp, Chenopodium album
cccttcctcattcgccgaaaacttcgattttggcagcctagaaacatacccaccaagcttaataggctgatcccaattaggcacaaccaattgttgctgaatatctttaggaatatcaatcaaaacaggtccaggcctaccagaattagctaaataaaaacgcttccttaacaactctaggaatatcctcaacatctaaa

SEQ ID NO: 638 - DNA, 200 bp, Chenopodium album
gaagttttcggcgaatgaggaagggcttcttgagcagattgtgaggttgatgagtgaggctaagaagcctgtgttgtatgtgggaggtgggtgtttgaattctagtgaggaattgaggaaattcgtcgaattgacagggattccggtggctagtactttgatggggttaggagcttacccttgtaatgatgaattgtccc

SEQ ID NO: 639 - DNA, 200 bp, Chenopodium album
gggacaattcatcattacaagggtaagctcctaaccccatcaaagtactagccaccggaatccctgtcaattcgacgaatttcctcaattcctcactagaattcaaacacccacctcccacatacaacacaggcttcttagcctcactcatcaacctcacaatctgctcaagaagcccttcctcattcgccgaaaacttc

SEQ ID NO: 640 - DNA, 200 bp, Chenopodium album
tacccttgtaatgatgaattgtcccttcatatgttgggaatgcacgggactgtgtacgcgaattatgctgttgataaggcggatttgctgcttgctttcggggttaggtttgatgatcgtgtgacagggaagctcgaggcgtttgctagccgagctaagattgtgcacattgatattgattctgctgagattgggaagaa

SEQ ID NO: 641 - DNA, 200 bp, Chenopodium album
ttcttcccaatctcagcagaatcaatatcaatgtgcacaatcttagctcggctagcaaacgcctcgagcttccctgtcacacgatcatcaaacctaaccccgaaagcaagcagcaaatccgccttatcaacagcataattcgcgtacacagtcccgtgcattcccaacatatgaagggacaattcatcattacaagggta

SEQ ID NO: 642 - DNA, 200 bp, Chenopodium album
ttgattctgctgagattgggaagaataagcagcctcatgtgtcgatttgtgctgatgttaagctggcgttgaagggtatgaataagattctggagtctcgaaaagggaagttgaatttagattactctagttggagggaggagttgggtgagcagaagaagaagtttccattgagttttaagacctttggtgaggctatt

SEQ ID NO: 643 - DNA, 200 bp, Chenopodium album
aatagcctcaccaaaggtcttaaaactcaatggaaacttcttcttctgctcacccaactcctccctccaactagagtaatctaaattcaacttcccttttcgagactccagaatcttattcatacccttcaacgccagcttaacatcagcacaaatcgacacatgaggctgcttattcttcccaatctcagcagaatcaa

SEQ ID NO: 644 - DNA, 200 bp, Chenopodium album
ttttaagacctttggtgaggctattcctccccaatacgccattcagatgctcgatgagctaactgatggtaatgctgttataagtactggtgttgggcaacatcaaatgtgggctgcccagcattacaagtatcgaaaccctcgacagtggctgacctcaggtggtttaggagccatgggattcgggctaccagctgcca

SEQ ID NO: 645 - DNA, 200 bp, Chenopodium album
tggcagctggtagcccgaatcccatggctcctaaaccacctgaggtcagccactgtcgagggtttcgatacttgtaatgctgggcagcccacatttgatgttgcccaacaccagtacttataacagcattaccatcagttagctcatcgagcatctgaatggcgtattggggaggaatagcctcaccaaaggtcttaaaa

SEQ ID NO: 646 - DNA, 200 bp, Chenopodium album
atgggattcgggctaccagctgccattggagcagctgtggctcgtccagagtcagtggttgtcgatattgatggggatgggagtttcatcatgaatgtgcaagaattagctaccataagggtggaaaatctgcctgttaagataatgctcttaaacaatcaacatttaggtatggtggttcaatgggaagacagattcta

SEQ ID NO: 647 - DNA, 200 bp, Chenopodium album
tagaatctgtcttcccattgaaccaccatacctaaatgttgattgtttaagagcattatcttaacaggcagattttccacccttatggtagctaattcttgcacattcatgatgaaactcccatccccatcaatatcgacaaccactgactctggacgagccacagctgctccaatggcagctggtagcccgaatcccat

SEQ ID NO: 648 - DNA, 200 bp, Chenopodium album
tggttcaatgggaagacagattctacaaagccaatagagcgcatacataccttggaaacccttctaaagagtctgaaatcttccccgatatgctcaaattcgctgaagcctgtgatattcctgctgcccgtgttaccaaggtgagcgagttgagggccgcaatgcagaaaatgttggatactccggggccatacctgctg

SEQ ID NO: 649 - DNA, 200 bp, Chenopodium album
cagcaggtatggccccggagtatccaacattttctgcattgcggccctcaactcgctcaccttggtaacacgggcagcaggaatatcacaggcttcagcgaatttgagcatatcggggaagatttcagactctttagaagggtttccaaggtatgtatgcgctctattggctttgtagaatctgtcttcccattgaacca

SEQ ID NO: 650 - DNA, 200 bp, Chenopodium album
ggatactccggggccatacctgctggatgtgattgtacctcatcaagagcatgtgctgcctatgatcccaagtggtgccgccttcaaagatatcattaacgagggtgatggaagaacatcttattaatcgcattatcgatgatgatgcttaaatctgtatgtataataatatgtttagagaggttatgactgttttctct

SEQ ID NO: 651 - DNA, 200 bp, Chenopodium album
agagaaaacagtcataacctctctaaacatattattatacatacagatttaagcatcatcatcgataatgcgattaataagatgttcttccatcaccctcgttaatgatatctttgaaggcggcaccacttgggatcataggcagcacatgctcttgatgaggtacaatcacatccagcaggtatggccccggagtatcc

SEQ ID NO: 652 - DNA, 200 bp, Chenopodium album
ctgcttggtctggaccatatgtcagaacatttactctcactattgtcattactcactacaccagaggccaccatcatcagagtccgttcaacatcaccactctcctgtctaacacctactccttctctgtagctataatcaggaacgttttgatctgcctggtaatgaaggaattgggagccagaatgaacctgaagatt

SEQ ID NO: 653 - DNA, 200 bp, Chenopodium album
aatcttcaggttcattctggctcccaattccttcattaccaggcagatcaaaacgttcctgattatagctacagagaaggagtaggtgttagacaggagagtggtgatgttgaacggactctgatgatggtggcctctggtgtagtgagtaatgacaatagtgagagtaaatgttctgacatatggtccagaccaagcag

SEQ ID NO: 654 - DNA, 200 bp, Chenopodium album
gggagccagaatgaacctgaagattagactgggttgaatcaatcatggaagatccaaataacccatgttcaaaaatcctaaaaacacccaaaaacaaacaaaccccacaaaatagaaagaacatccattgacctaatttctctctcttcaaccttcaatgccttcatcaatggcggctacttcctcaaacccttcattct

SEQ ID NO: 655 - DNA, 200 bp, Chenopodium album
agaatgaagggtttgaggaagtagccgccattgatgaaggcattgaaggttgaagagagagaaattaggtcaatggatgttctttctattttgtggggtttgtttgtttttgggtgtttttaggatttttgaacatgggttatttggatcttccatgattgattcaacccagtctaatcttcaggttcattctggctccc

SEQ ID NO: 656 - DNA, 200 bp, Chenopodium album
gctacttcctcaaacccttcattctcccctttcccaaccctctcttccaaaacccctaaaccccaatcctccatttactccctcccttttcccactaaccccaaaacgccatcttccttcctccgccgccctctccaaatctccgcctctcaatccgctaacccaaaaccgccatccgctactcaaaccgctgttccttc

SEQ ID NO: 657 - DNA, 200 bp, Chenopodium album
gaaggaacagcggtttgagtagcggatggcggttttgggttagcggattgagaggcggagatttggagagggcggcggaggaaggaagatggcgttttggggttagtgggaaaagggagggagtaaatggaggattggggtttaggggttttggaagagagggttgggaaaggggagaatgaagggtttgaggaagtagc

SEQ ID NO: 658 - DNA, 200 bp, Chenopodium album
ccgctactcaaaccgctgttccttcccctctcaccgaggaaaacccgcaatctttcgtttcccgatttgcccctgatgaacccagaaaaggctgtgatgtcctcgttgaagctttggagcgtgaaggtgttaccaatgtgtttgcttaccctggtggtgcatcaatggagattcatcaagctctcacgcgctctggttct

SEQ ID NO: 659 - DNA, 200 bp, Chenopodium album
agaaccagagcgcgtgagagcttgatgaatctccattgatgcaccaccagggtaagcaaacacattggtaacaccttcacgctccaaagcttcaacgaggacatcacagccttttctgggttcatcaggggcaaatcgggaaacgaaagattgcgggttttcctcggtgagaggggaaggaacagcggtttgagtagcgg

SEQ ID NO: 660 - DNA, 200 bp, Chenopodium album
tcaagctctcacgcgctctggttctatcaggaacgtcctcccccggcacgagcaaggtggggttttcgctgcggaagggtatgctcgagctactgggcgcgtgggtgtgtgcattgcaacctctggtcctggtgccactaatcttgtatcgggtctcgctgatgcgctgcttgattctgtccctttggttgcgatcactg

SEQ ID NO: 661 - DNA, 200 bp, Chenopodium album
cagtgatcgcaaccaaagggacagaatcaagcagcgcatcagcgagacccgatacaagattagtggcaccaggaccagaggttgcaatgcacacacccacgcgcccagtagctcgagcatacccttccgcagcgaaaaccccaccttgctcgtgccgggggaggacgttcctgatagaaccagagcgcgtgagagcttga

SEQ ID NO: 662 - DNA, 200 bp, Chenopodium album
tctgtccctttggttgcgatcactggtcaggtgcctcgccgaatgattggaactgatgcatttcaggagactcctattgttgaggttactcgttctatcactaagcataattatttggttttagatgttgaggatattcctagagttgttaaggaagcgtttttatttagctaattctggtaggcctggacctgttttga

SEQ ID NO: 663 - DNA, 200 bp, Chenopodium album
tcaaaacaggtccaggcctaccagaattagctaaataaaaacgcttccttaacaactctaggaatatcctcaacatctaaaaccaaataattatgcttagtgatagaacgagtaacctcaacaataggagtctcctgaaatgcatcagttccaatcattcggcgaggcacctgaccagtgatcgcaaccaaagggacaga

SEQ ID NO: 664 - DNA, 200 bp, Chenopodium album
tctggtaggcctggacctgttttgattgatattcctaaagatattcagcaacaattggttgtgcctaattgggatcagcctattaagcttggtgggtatgtttctaggctgccaaaatcgaagttttcggcgaatgaggaagggcttcttgagcagattgtgaggttgatgagtgaggctaagaagcctgtgttgtatgt

SEQ ID NO: 665 - DNA, 200 bp, Chenopodium album
acatacaacacaggcttcttagcctcactcatcaacctcacaatctgctcaagaagcccttcctcattcgccgaaaacttcgattttggcagcctagaaacatacccaccaagcttaataggctgatcccaattaggcacaaccaattgttgctgaatatctttaggaatatcaatcaaaacaggtccaggcctaccaga

SEQ ID NO: 666 - DNA, 200 bp, Chenopodium album
aggctaagaagcctgtgttgtatgtgggaggtgggtgtttgaattctagtgaggaattgaggaaattcgtcgaattgacagggattccggtggctagtactttgatggggttaggagcttacccttgtaatgatgaattgtcccttcatatgttgggaatgcacgggactgtgtacgcgaattatgctgttgataaggcg

SEQ ID NO: 667 - DNA, 200 bp, Chenopodium album
cgccttatcaacagcataattcgcgtacacagtcccgtgcattcccaacatatgaagggacaattcatcattacaagggtaagctcctaaccccatcaaagtactagccaccggaatccctgtcaattcgacgaatttcctcaattcctcactagaattcaaacacccacctcccacatacaacacaggcttcttagcct

SEQ ID NO: 668 - DNA, 200 bp, Chenopodium album
cgcgaattatgctgttgataaggcggatttgctgcttgctttcggggttaggtttgatgatcgtgtgacagggaagctcgaggcgtttgctagccgagctaagattgtgcacattgatattgattctgctgagattgggaagaataagcagcctcatgtgtcgatttgtgctgatgttaagctggcgttgaagggtatga

SEQ ID NO: 669 - DNA, 200 bp, Chenopodium album
tcatacccttcaacgccagcttaacatcagcacaaatcgacacatgaggctgcttattcttcccaatctcagcagaatcaatatcaatgtgcacaatcttagctcggctagcaaacgcctcgagcttccctgtcacacgatcatcaaacctaaccccgaaagcaagcagcaaatccgccttatcaacagcataattcgcg

SEQ ID NO: 670 - DNA, 200 bp, Chenopodium album
gttaagctggcgttgaagggtatgaataagattctggagtctcgaaaagggaagttgaatttagattactctagttggagggaggagttgggtgagcagaagaagaagtttccattgagttttaagacctttggtgaggctattcctccccaatacgccattcagatgctcgatgagctaactgatggtaatgctgttat

SEQ ID NO: 671 - DNA, 200 bp, Chenopodium album
ataacagcattaccatcagttagctcatcgagcatctgaatggcgtattggggaggaatagcctcaccaaaggtcttaaaactcaatggaaacttcttcttctgctcacccaactcctccctccaactagagtaatctaaattcaacttcccttttcgagactccagaatcttattcatacccttcaacgccagcttaac

SEQ ID NO: 672 - DNA, 200 bp, Chenopodium album
agctaactgatggtaatgctgttataagtactggtgttgggcaacatcaaatgtgggctgcccagcattacaagtatcgaaaccctcgacagtggctgacctcaggtggtttaggagccatgggattcgggctaccagctgccattggagcagctgtggctcgtccagagtcagtggttgtcgatattgatggggatggg

SEQ ID NO: 673 - DNA, 200 bp, Chenopodium album
cccatccccatcaatatcgacaaccactgactctggacgagccacagctgctccaatggcagctggtagcccgaatcccatggctcctaaaccacctgaggtcagccactgtcgagggtttcgatacttgtaatgctgggcagcccacatttgatgttgcccaacaccagtacttataacagcattaccatcagttagct

SEQ ID NO: 674 - DNA, 200 bp, Chenopodium album
ggttgtcgatattgatggggatgggagtttcatcatgaatgtgcaagaattagctaccataagggtggaaaatctgcctgttaagataatgctcttaaacaatcaacatttaggtatggtggttcaatgggaagacagattctacaaagccaatagagcgcatacataccttggaaacccttctaaagagtctgaaatct

SEQ ID NO: 675 - DNA, 200 bp, Chenopodium album
agatttcagactctttagaagggtttccaaggtatgtatgcgctctattggctttgtagaatctgtcttcccattgaaccaccatacctaaatgttgattgtttaagagcattatcttaacaggcagattttccacccttatggtagctaattcttgcacattcatgatgaaactcccatccccatcaatatcgacaacc

SEQ ID NO: 676 - DNA, 200 bp, Chenopodium album
aacccttctaaagagtctgaaatcttccccgatatgctcaaattcgctgaagcctgtgatattcctgctgcccgtgttaccaaggtgagcgagttgagggccgcaatgcagaaaatgttggatactccggggccatacctgctggatgtgattgtacctcatcaagagcatgtgctgcctatgatcccaagtggtgccgc

SEQ ID NO: 677 - DNA, 200 bp, Chenopodium album
gcggcaccacttgggatcataggcagcacatgctcttgatgaggtacaatcacatccagcaggtatggccccggagtatccaacattttctgcattgcggccctcaactcgctcaccttggtaacacgggcagcaggaatatcacaggcttcagcgaatttgagcatatcggggaagatttcagactctttagaagggtt

SEQ ID NO: 678 - DNA, 200 bp, Chenopodium album
tgcctatgatcccaagtggtgccgccttcaaagatatcattaacgagggtgatggaagaacatcttattaatcgcattatcgatgatgatgcttaaatctgtatgtataataatatgtttagagaggttatgactgttttctctttaggttagtttgttgttcacatgctgcttgctactactatgattaacttttttgt

SEQ ID NO: 679 - DNA, 200 bp, Chenopodium album
acaaaaaagttaatcatagtagtagcaagcagcatgtgaacaacaaactaacctaaagagaaaacagtcataacctctctaaacatattattatacatacagatttaagcatcatcatcgataatgcgattaataagatgttcttccatcaccctcgttaatgatatctttgaaggcggcaccacttgggatcataggca

SEQ ID NO: 680 - DNA, 200 bp, Commelina diffusa
ctttcgttgaggatgcttggaatgcatggtactgtgagcgcaaattactcagttgataagtctgatttgttgcttgcttttggggttaggtttgatgatagggtgactgggaagctggagacatttgctagtagggcgaagattgtgcacattgatattgatagggctgagattggtaagaacaagcagccccatgtgtc

SEQ ID NO: 681 - DNA, 200 bp, Commelina diffusa
gacacatggggctgcttgttcttaccaatctcagccctatcaatatcaatgtgcacaatcttcgccctactagcaaatgtctccagcttcccagtcaccctatcatcaaacctaaccccaaaagcaagcaacaaatcagacttatcaactgagtaatttgcgctcacagtaccatgcattccaagcatcctcaacgaaag

SEQ ID NO: 682 - DNA, 200 bp, Conyza canadensis
caaaattaaaatttaaaagtactggatgttcaaagttaacaaacaagataaaaataatatgtgacttgataaaccatatattgttgtctatcgagggtgatcgacctgcatcttcatatccctagtgttgtgtctcgactttttgcatgtgtcatcattgtcaagaaccaattctattgtatcataacgtttacactagc

SEQ ID NO: 683 - DNA, 200 bp, Conyza canadensis
gctagtgtaaacgttatgatacaatagaattggttcttgacaatgatgacacatgcaaaaagtcgagacacaacactagggatatgaagatgcaggtcgatcaccctcgatagacaacaatatatggtttatcaagtcacatattatttttatcttgtttgttaactttgaacatccagtacttttaaattttaattttg

SEQ ID NO: 684 - DNA, 200 bp, Conyza canadensis
attgtatcataacgtttacactagctaatcaacccaggttctacctgagcattttattaaaattttaaaagcaaaaaaaattttaaaaagtgtatataatttttgttattgatatattataactcggttttgagatattaaattaattaacatgataatttatatatattagtatatattgcattaacaaaacataaaaa

SEQ ID NO: 685 - DNA, 200 bp, Conyza canadensis
tttttatgttttgttaatgcaatatatactaatatatataaattatcatgttaattaatttaatatctcaaaaccgagttataatatatcaataacaaaaattatatacactttttaaaattttttttgcttttaaaattttaataaaatgctcaggtagaacctgggttgattagctagtgtaaacgttatgatacaat

SEQ ID NO: 686 - DNA, 200 bp, Conyza canadensis
atattgcattaacaaaacataaaaagacattttataatattatattaaaaaaaatttactttgattcgaataaaagaataaatttgtagacatcataaataaaagaaaacattttgaaaatatttaatgggctatttatctttaaaaagatttttgattaaatatgacattataaatagataaaacattttaaagaaatt

SEQ ID NO: 687 - DNA, 200 bp, Conyza canadensis
aatttctttaaaatgttttatctatttataatgtcatatttaatcaaaaatctttttaaagataaatagcccattaaatattttcaaaatgttttcttttatttatgatgtctacaaatttattcttttattcgaatcaaagtaaattttttttaatataatattataaaatgtctttttatgttttgttaatgcaatat

SEQ ID NO: 688 - DNA, 200 bp, Conyza canadensis
atagataaaacattttaaagaaatttgtaaacatgacacatcataattgtttttaaaaataatttaaaaagaatccttctttattatatataaagattacatattaaatatatgttgtttcaatcttacctttctttttaaataaacttagctaactttgatagtttgttttttattttttttatttttaaacaacagat

SEQ ID NO: 689 - DNA, 200 bp, Conyza canadensis
atctgttgtttaaaaataaaaaaaataaaaaacaaactatcaaagttagctaagtttatttaaaaagaaaggtaagattgaaacaacatatatttaatatgtaatctttatatataataaagaaggattctttttaaattatttttaaaaacaattatgatgtgtcatgtttacaaatttctttaaaatgttttatctat

SEQ ID NO: 690 - DNA, 200 bp, Conyza canadensis
ttttttttatttttaaacaacagattgattttattaatagttggttgaaaattgatcaaccaataaaaagaaaaaattaaatacaaagaagaggacttttcaaccattcatcccaagatatttgcttctttttatagcgataccataaaaatgaatgagttataatcgaatcaacaagaacatcatgtcttttattggag

SEQ ID NO: 691 - DNA, 200 bp, Conyza canadensis
ctccaataaaagacatgatgttcttgttgattcgattataactcattcatttttatggtatcgctataaaaagaagcaaatatcttgggatgaatggttgaaaagtcctcttctttgtatttaattttttctttttattggttgatcaattttcaaccaactattaataaaatcaatctgttgtttaaaaataaaaaaaa

SEQ ID NO: 692 - DNA, 200 bp, Conyza canadensis
aagaacatcatgtcttttattggagcaaccgaagactttataactttgatagttgagttgcgaaaatttatttaaagttcgactgggatatttctaatctactagctacaaacacttgagctaaaattgaaccttgaacatggtaagtaaatcattttggagagatttcatgctttctctgtatcttaattctatttgtc

SEQ ID NO: 693 - DNA, 200 bp, Conyza canadensis
gacaaatagaattaagatacagagaaagcatgaaatctctccaaaatgatttacttaccatgttcaaggttcaattttagctcaagtgtttgtagctagtagattagaaatatcccagtcgaactttaaataaattttcgcaactcaactatcaaagttataaagtcttcggttgctccaataaaagacatgatgttctt

SEQ ID NO: 694 - DNA, 200 bp, Conyza canadensis
tctctgtatcttaattctatttgtctaattggtttggtcgcaacccgaaacatggttagaattacataaaaaacacaacgaagtgaaatccggtagctcgaccttcgttcgttgggagtttttcctcgtgtcttgggtcactgtaattggcacgaggttttttcactccttttgtagttcttacagttaatatttcggaa

SEQ ID NO: 695 - DNA, 200 bp, Conyza canadensis
ttccgaaatattaactgtaagaactacaaaaggagtgaaaaaacctcgtgccaattacagtgacccaagacacgaggaaaaactcccaacgaacgaaggtcgagctaccggatttcacttcgttgtgttttttatgtaattctaaccatgtttcgggttgcgaccaaaccaattagacaaatagaattaagatacagaga

SEQ ID NO: 696 - DNA, 200 bp, Conyza canadensis
agttcttacagttaatatttcggaaagagtctaaatttattgtattgctttttttagattgtaattataattataccctattacaactagtgccttgttagttgtttattttaaataatattttctgtcgttctaggaaaaaaaaaattgaaccttgaacacttaatgcggaagtagttaatacttgcaaacttaaggaa

SEQ ID NO: 697 - DNA, 200 bp, Conyza canadensis
ttccttaagtttgcaagtattaactacttccgcattaagtgttcaaggttcaattttttttttcctagaacgacagaaaatattatttaaaataaacaactaacaaggcactagttgtaatagggtataattataattacaatctaaaaaaagcaatacaataaatttagactctttccgaaatattaactgtaagaact

SEQ ID NO: 698 - DNA, 200 bp, Conyza canadensis
agttaatacttgcaaacttaaggaataagttaagtaggctttgatgctatagatagtcctaagccatcactcttcaaaacacaatttacacaatatttctagaaaaatcaaaacttccatagatatgtgaaaataataaaatggatgtatatacaaaaaaaaaaacataataaaaaattgaaaaacttatacacgcgtac

SEQ ID NO: 699 - DNA, 200 bp, Conyza canadensis
gtacgcgtgtataagtttttcaattttttattatgtttttttttttgtatatacatccattttattattttcacatatctatggaagttttgatttttctagaaatattgtgtaaattgtgttttgaagagtgatggcttaggactatctatagcatcaaagcctacttaacttattccttaagtttgcaagtattaact

SEQ ID NO: 700 - DNA, 200 bp, Conyza canadensis
aattgaaaaacttatacacgcgtacaagccaatgattatagtctaactggttagagacattttaggtttatctaaagttttgagtcgatctttaggaatgataagtttaggttttttttttctctgaatatttataacggtccatggtcaacattttgttttctaagatacgtgcaagacttaccattatatggtgatgt

SEQ ID NO: 701 - DNA, 200 bp, Conyza canadensis
acatcaccatataatggtaagtcttgcacgtatcttagaaaacaaaatgttgaccatggaccgttataaatattcagagaaaaaaaaaacctaaacttatcattcctaaagatcgactcaaaactttagataaacctaaaatgtctctaaccagttagactataatcattggcttgtacgcgtgtataagtttttcaatt

SEQ ID NO: 702 - DNA, 200 bp, Conyza canadensis
aagacttaccattatatggtgatgtttctctaatgtcacataccgaccaaatgtttgtacaaaaataaaaataaatacgtgtataaaagtcggcaaacgaaaattaaaaaaacaggatctcatacattcacttccacacacactactcctagctctcattttttatttcctttttcatccccagcaaaaacacgcacaca

SEQ ID NO: 703 - DNA, 200 bp, Conyza canadensis
tgtgtgcgtgtttttgctggggatgaaaaaggaaataaaaaatgagagctaggagtagtgtgtgtggaagtgaatgtatgagatcctgtttttttaattttcgtttgccgacttttatacacgtatttatttttatttttgtacaaacatttggtcggtatgtgacattagagaaacatcaccatataatggtaagtctt

SEQ ID NO: 704 - DNA, 200 bp, Conyza canadensis
catccccagcaaaaacacgcacacataaattaaattcaaacgaatcaaaccctaaaaacaacaaaaaaaaaataatacaatctcacacacacattttcaaacatggcggccgtaacttcaccaaacccacctttcaccaccaccaccacaaaaccaccgcattccgccaccacatttcaccgtcccaccaccactcattt

SEQ ID NO: 705 - DNA, 200 bp, Conyza canadensis
aaatgagtggtggtgggacggtgaaatgtggtggcggaatgcggtggttttgtggtggtggtggtgaaaggtgggtttggtgaagttacggccgccatgtttgaaaatgtgtgtgtgagattgtattattttttttttgttgtttttagggtttgattcgtttgaatttaatttatgtgtgcgtgtttttgctggggatg

SEQ ID NO: 706 - DNA, 200 bp, Conyza canadensis
ttcaccgtcccaccaccactcatttatccttcccaaccccaccaaaacgaaaccgtttccttcacatcaccaacgtcctctcggaccacaaacccatcactaccaccactacaaccaccgttccaccaccttcattcacttcccgtttcgccgccgaccaaccccggaagggctccgacgttctcgtagaagccctcgaa

SEQ ID NO: 707 - DNA, 200 bp, Conyza canadensis
ttcgagggcttctacgagaacgtcggagcccttccggggttggtcggcggcgaaacgggaagtgaatgaaggtggtggaacggtggttgtagtggtggtagtgatgggtttgtggtccgagaggacgttggtgatgtgaaggaaacggtttcgttttggtggggttgggaaggataaatgagtggtggtgggacggtgaa

SEQ ID NO: 708 - DNA, 200 bp, Conyza canadensis
cgacgttctcgtagaagccctcgaacgtgaaggcgtcaccgacgtcttcgcttaccctggtggcgcgtcaatggagatccaccaagctctcacgcgctccaccaccatccgcaacgtcctcccccgccatgaacaaggtggcatcttcgccgcagaaggctacgcacgtgcctccggtctccccggcgtctgtatagcca

SEQ ID NO: 709 - DNA, 200 bp, Conyza canadensis
tggctatacagacgccggggagaccggaggcacgtgcgtagccttctgcggcgaagatgccaccttgttcatggcgggggaggacgttgcggatggtggtggagcgcgtgagagcttggtggatctccattgacgcgccaccagggtaagcgaagacgtcggtgacgccttcacgttcgagggcttctacgagaacgtcg

SEQ ID NO: 710 - DNA, 200 bp, Conyza canadensis
ggtctccccggcgtctgtatagccacttccggtcccggcgccacaaaccttgtctccggccttgctgacgcgcttcttgacagtgtccccgtcgttgccatcaccggccaagttccccggcgaatgatcggaactgatgcttttcaagaaacacccattgttgaggtaacaagatccattactaaacataactatttggt

SEQ ID NO: 711 - DNA, 200 bp, Conyza canadensis
accaaatagttatgtttagtaatggatcttgttacctcaacaatgggtgtttcttgaaaagcatcagttccgatcattcgccggggaacttggccggtgatggcaacgacggggacactgtcaagaagcgcgtcagcaaggccggagacaaggtttgtggcgccgggaccggaagtggctatacagacgccggggagacc

SEQ ID NO: 712 - DNA, 200 bp, Conyza canadensis
ccattactaaacataactatttggttttagatgttgatgatattccaagaattgttagagaagctttttatcttgcccggtcgggtcgacccggacccgttttgattgatattccaaaagatatacaacaacagttatgtgtgcctaaatgggatgagcccatgaggcttcctggttatttatctaggttacctaagcca

SEQ ID NO: 713 - DNA, 200 bp, Conyza canadensis
tggcttaggtaacctagataaataaccaggaagcctcatgggctcatcccatttaggcacacataactgttgttgtatatcttttggaatatcaatcaaaacgggtccgggtcgacccgaccgggcaagataaaaagcttctctaacaattcttggaatatcatcaacatctaaaaccaaatagttatgtttagtaatgg

SEQ ID NO: 714 - DNA, 200 bp, Conyza canadensis
ttatttatctaggttacctaagccacctaatgatggtttactagaacaaattgtgaggttagttggagagtcgaaaaggccggttttgtatgtaggtggtggttgtttgaattcgagtgatgagttgagacggtttgttgagcttacgggtattccggtagctagtactttaatgggtcttgggtcttatccagcttcga

SEQ ID NO: 715 - DNA, 200 bp, Conyza canadensis
tcgaagctggataagacccaagacccattaaagtactagctaccggaatacccgtaagctcaacaaaccgtctcaactcatcactcgaattcaaacaaccaccacctacatacaaaaccggccttttcgactctccaactaacctcacaatttgttctagtaaaccatcattaggtggcttaggtaacctagataaataa

SEQ ID NO: 716 - DNA, 200 bp, Conyza canadensis
ggtcttgggtcttatccagcttcgagtgatttgtctcttcaaatgcttggaatgcatggaactgtttatgcgaattatgctgttgataaggcggatttgttgcttgcgtttggggttaggtttgatgaccgtgtgactggaaagcttgaagcttttgctagtagagctaagattgttcatattgatattgactctgctga

SEQ ID NO: 717 - DNA, 200 bp, Conyza canadensis
tcagcagagtcaatatcaatatgaacaatcttagctctactagcaaaagcttcaagctttccagtcacacggtcatcaaacctaaccccaaacgcaagcaacaaatccgccttatcaacagcataattcgcataaacagttccatgcattccaagcatttgaagagacaaatcactcgaagctggataagacccaagacc

SEQ ID NO: 718 - DNA, 200 bp, Conyza canadensis
ttcatattgatattgactctgctgagattgggaagaataagcagccacatgtgtcggtttgtggtgatattaagattgcgttacagggtcttaacaagattttagaagggaggcgtgagatgagtaatcttgatttttcggcgtggagggcagagttggatgaacaaaaggtgaaccatccgttgagttttaaaacgttc

SEQ ID NO: 719 - DNA, 200 bp, Conyza canadensis
gaacgttttaaaactcaacggatggttcaccttttgttcatccaactctgccctccacgccgaaaaatcaagattactcatctcacgcctcccttctaaaatcttgttaagaccctgtaacgcaatcttaatatcaccacaaaccgacacatgtggctgcttattcttcccaatctcagcagagtcaatatcaatatgaa

SEQ ID NO: 720 - DNA, 200 bp, Conyza canadensis
ccatccgttgagttttaaaacgttcggtgaagctattccaccgcaatatgctattcaggtgcttgatgagttaacgggtgggaatgctattataagtactggggtcgggcaacatcagatgtgggctgctcagttttacaagtacaacagacctagacagtggttgacttcaggtggactaggggctatgggctttggac

SEQ ID NO: 721 - DNA, 200 bp, Conyza canadensis
gtccaaagcccatagcccctagtccacctgaagtcaaccactgtctaggtctgttgtacttgtaaaactgagcagcccacatctgatgttgcccgaccccagtacttataatagcattcccacccgttaactcatcaagcacctgaatagcatattgcggtggaatagcttcaccgaacgttttaaaactcaacggatgg

SEQ ID NO: 722 - DNA, 200 bp, Conyza canadensis
ggactaggggctatgggctttggactgcctgcagccattggtgcagccgttgcaagacctgatgcagtggtagtggatatcgatggtgatggaagttttatcatgaatgttcaagagttggctactatccgagtggaaaatcttcctgtcaaggttttgttactcaataatcagcatttgggtatggtggttcaatggga

SEQ ID NO: 723 - DNA, 200 bp, Conyza canadensis
tcccattgaaccaccatacccaaatgctgattattgagtaacaaaaccttgacaggaagattttccactcggatagtagccaactcttgaacattcatgataaaacttccatcaccatcgatatccactaccactgcatcaggtcttgcaacggctgcaccaatggctgcaggcagtccaaagcccatagcccctagtcc

SEQ ID NO: 724 - DNA, 200 bp, Conyza canadensis
atttgggtatggtggttcaatgggaggatcgtttctacaaggcaaatagggcgcatacctacttggggaacccatcaaaggaggctgaaatatttccaaacatgttgaagtttgccgaagcgtgtgatataccagctgcacgagtgacccgtaaagctgatctacgggcggctattcagaagatgttggatactcctggg

SEQ ID NO: 725 - DNA, 200 bp, Conyza canadensis
cccaggagtatccaacatcttctgaatagccgcccgtagatcagctttacgggtcactcgtgcagctggtatatcacacgcttcggcaaacttcaacatgtttggaaatatttcagcctcctttgatgggttccccaagtaggtatgcgccctatttgccttgtagaaacgatcctcccattgaaccaccatacccaaat

SEQ ID NO: 726 - DNA, 200 bp, Conyza canadensis
tcagaagatgttggatactcctgggccttacttgttggatgtcattgtgccgcatcaagaacatgttttgccgatgattcctgctggtgggggcttcatggatgtgatcaccgagggtgatggtagaacgaagtattgagcttcaaagtcacaacttagtttcaagtttcaaccactgtatgtaaacatctagcatcttt

SEQ ID NO: 727 - DNA, 200 bp, Conyza canadensis
aaagatgctagatgtttacatacagtggttgaaacttgaaactaagttgtgactttgaagctcaatacttcgttctaccatcaccctcggtgatcacatccatgaagcccccaccagcaggaatcatcggcaaaacatgttcttgatgcggcacaatgacatccaacaagtaaggcccaggagtatccaacatcttctga

SEQ ID NO: 728 - DNA, 200 bp, Conyza canadensis
ctgtatgtaaacatctagcatctttacttaagaggtgtgagcagtttgttggatttgaagttaatttcttgttgtgtattttagtttctggttttttgaatgttccgtagtagtgtattgactgttcttttagtagcctcatgaataaatgtctttttttccttgcctgcgtagttttgtagaagtaatcttctgtttct

SEQ ID NO: 729 - DNA, 200 bp, Conyza canadensis
agaaacagaagattacttctacaaaactacgcaggcaaggaaaaaaagacatttattcatgaggctactaaaagaacagtcaatacactactacggaacattcaaaaaaccagaaactaaaatacacaacaagaaattaacttcaaatccaacaaactgctcacacctcttaagtaaagatgctagatgtttacatacag

SEQ ID NO: 730 - DNA, 200 bp, Conyza canadensis
tttgtagaagtaatcttctgtttctatgtttatagcaaggaccaaaagaagagtattagagcccctggtctaaaagtcggatatctgaagtcaaattttagcccctattaagatatgtctctttttgattgtggtcaatactagctgtaagataccatttgagatcagcaattacccgttgcggtttcattttggtttgg

SEQ ID NO: 731 - DNA, 200 bp, Conyza canadensis
ccaaaccaaaatgaaaccgcaacgggtaattgctgatctcaaatggtatcttacagctagtattgaccacaatcaaaaagagacatatcttaataggggctaaaatttgacttcagatatccgacttttagaccaggggctctaatactcttcttttggtccttgctataaacatagaaacagaagattacttctacaaa

SEQ ID NO: 732 - DNA, 200 bp, Conyza canadensis
ccgttgcggtttcattttggtttggtctggtctggtctggtctggtctatttcttgttgtgtagtttctgctatttgtgggctatatgttctggttttcttgggttactgtgtttgggcttagtattacaatctattagttttgaagttggttcatatttagtaaactataaattttcaaaaactattcttgatcggtcc

SEQ ID NO: 733 - DNA, 200 bp, Conyza canadensis
ggaccgatcaagaatagtttttgaaaatttatagtttactaaatatgaaccaacttcaaaactaatagattgtaatactaagcccaaacacagtaacccaagaaaaccagaacatatagcccacaaatagcagaaactacacaacaagaaatagaccagaccagaccagaccagaccaaaccaaaatgaaaccgcaacgg

SEQ ID NO: 734 - DNA, 200 bp, Conyza canadensis
ttcaaaaactattcttgatcggtccagcatcagtatatactggttcagaaacttgatagatgttgctcaatctttccgtcctgaatggggcattgattgttaggatgtttttgtatagggtgactaatatttctggaaggatgttcggtttggtagtgtttccgaacaggtgtaggctgcttctgagtgggcagagtacg

SEQ ID NO: 735 - DNA, 200 bp, Conyza canadensis
cgtactctgcccactcagaagcagcctacacctgttcggaaacactaccaaaccgaacatccttccagaaatattagtcaccctatacaaaaacatcctaacaatcaatgccccattcaggacggaaagattgagcaacatctatcaagtttctgaaccagtatatactgatgctggaccgatcaagaatagtttttgaa

SEQ ID NO: 736 - DNA, 200 bp, Conyza canadensis
gctgcttctgagtgggcagagtacgtaatctcatcacctactccttggggagggtttgacttgattttgagtcaagggtataagtcttgcaattgtagtttgcgttaggcagtggtcaatgatttattactaacttagcgttatattttccagctacaagtgctataagttaatgatttagtactaacacagaatgtagt

SEQ ID NO: 737 - DNA, 200 bp, Conyza canadensis
actacattctgtgttagtactaaatcattaacttatagcacttgtagctggaaaatataacgctaagttagtaataaatcattgaccactgcctaacgcaaactacaattgcaagacttatacccttgactcaaaatcaagtcaaaccctccccaaggagtaggtgatgagattacgtactctgcccactcagaagcagc

SEQ ID NO: 738 - DNA, 200 bp, Conyza canadensis
atttagtactaacacagaatgtagttcatttatgcatcaacgtaattattttccacactaaatttttgtgtgtgagatgacaataccggatgatgaaactttttatactaagcaaagtgagtttcttgtttgatcgaatgactatgatttatatatcacttcccaaatagaacgcaattaggtggttttaagattggagt

SEQ ID NO: 739 - DNA, 200 bp, Conyza canadensis
actccaatcttaaaaccacctaattgcgttctatttgggaagtgatatataaatcatagtcattcgatcaaacaagaaactcactttgcttagtataaaaagtttcatcatccggtattgtcatctcacacacaaaaatttagtgtggaaaataattacgttgatgcataaatgaactacattctgtgttagtactaaat

SEQ ID NO: 740 - DNA, 200 bp, Conyza canadensis
aattaggtggttttaagattggagtagagcagaccatcttcaagaactagtccagagcgagttggatactgggagtatacatcttttggggtacagttttgatggcgtttattaatattaatttcaacaaaccattttacatgctaaaaatagtggagtacctcaagttaaaacagctcaaacaggttaaaatacatcta

SEQ ID NO: 741 - DNA, 200 bp, Conyza canadensis
tagatgtattttaacctgtttgagctgttttaacttgaggtactccactatttttagcatgtaaaatggtttgttgaaattaatattaataaacgccatcaaaactgtaccccaaaagatgtatactcccagtatccaactcgctctggactagttcttgaagatggtctgctctactccaatcttaaaaccacctaatt

SEQ ID NO: 742 - DNA, 200 bp, Conyza canadensis
gctcaaacaggttaaaatacatctaagtttaaggcacaaaactgtctaaaaactgtaaacatctgtattgctctaaaaaaaactccgatttaaggcacttgtggcactgctgtagtttcaaacgatttcctcctaacaagtaagcacgtaatatttgaagaacgagtgctcatgttttcaggactgcataacacaaagtc

SEQ ID NO: 743 - DNA, 200 bp, Conyza canadensis
gactttgtgttatgcagtcctgaaaacatgagcactcgttcttcaaatattacgtgcttacttgttaggaggaaatcgtttgaaactacagcagtgccacaagtgccttaaatcggagttttttttagagcaatacagatgtttacagtttttagacagttttgtgccttaaacttagatgtattttaacctgtttgagc

SEQ ID NO: 744 - DNA, 200 bp, Conyza canadensis
tttcaggactgcataacacaaagtcgggcctgtggagtgctaagtggaggcgatcttcgcccataaccattgcagttgcatcaagcaaaacatgccattggtttctatgggcttcggacacccaatgcattgagtagtgggtcccatttacattcgcaggataagagaacaagccttttgggctttgcttacttttcctt

SEQ ID NO: 745 - DNA, 200 bp, Conyza canadensis
aaggaaaagtaagcaaagcccaaaaggcttgttctcttatcctgcgaatgtaaatgggacccactactcaatgcattgggtgtccgaagcccatagaaaccaatggcatgttttgcttgatgcaactgcaatggttatgggcgaagatcgcctccacttagcactccacaggcccgactttgtgttatgcagtcctgaaa

SEQ ID NO: 746 - DNA, 200 bp, Conyza canadensis
ttttgggctttgcttacttttccttctaaaatattgactgagttgtgaacctttgatcctcagatctaaccatgtctcgggtgctgatatcacttttgcgtccttgtaacctgcaaacgcttttatgtagtcatgttcttcgtttatgattgtcatgtagtaattacccctgaaaaatgggtaactttcacccaccaaca

SEQ ID NO: 747 - DNA, 200 bp, Conyza canadensis
tgttggtgggtgaaagttacccatttttcaggggtaattactacatgacaatcataaacgaagaacatgactacataaaagcgtttgcaggttacaaggacgcaaaagtgatatcagcacccgagacatggttagatctgaggatcaaaggttcacaactcagtcaatattttagaaggaaaagtaagcaaagcccaaaa

SEQ ID NO: 748 - DNA, 200 bp, Conyza canadensis
aatgggtaactttcacccaccaacatcatggcatcacgatagcttgaggtgaataaaacaagatactcttcatcaggcaacccacactgcttcaaaactttgtttcttgcttgaatttcaggtattgagatgaagcttccaagatatgatgactttttagtaaggatatccagtaatcttgatggctcgagctgaattct

SEQ ID NO: 749 - DNA, 200 bp, Conyza canadensis
agaattcagctcgagccatcaagattactggatatccttactaaaaagtcatcatatcttggaagcttcatctcaatacctgaaattcaagcaagaaacaaagttttgaagcagtgtgggttgcctgatgaagagtatcttgttttattcacctcaagctatcgtgatgccatgatgttggtgggtgaaagttacccatt

SEQ ID NO: 750 - DNA, 200 bp, Conyza canadensis
cacaaaattaaaatttagaagtactggatgttcaaagttaacaaacaagataaaaataatatgtgacttgataaaccatatattgttgtctatcgagggtgatcgacctgcatcttcatatccctagtgttgtgtctcgactttttgcatgtgtcatcattgtcaagaaccaattctattgtatcataacgtttacacta

SEQ ID NO: 751 - DNA, 200 bp, Conyza canadensis
tagtgtaaacgttatgatacaatagaattggttcttgacaatgatgacacatgcaaaaagtcgagacacaacactagggatatgaagatgcaggtcgatcaccctcgatagacaacaatatatggtttatcaagtcacatattatttttatcttgtttgttaactttgaacatccagtacttctaaattttaattttgtg

SEQ ID NO: 752 - DNA, 200 bp, Conyza canadensis
ctattgtatcataacgtttacactagctaatcaacccaggttctacctgagcattttattaaaattttaaaagcaaaaaaaattttaaaaagtgtatataatttttgttattgatatattataactcggttttgagatattaaattaattaacatgataatttatatatattagtatatattgcattaacaaaacataaa

SEQ ID NO: 753 - DNA, 200 bp, Conyza canadensis
tttatgttttgttaatgcaatatatactaatatatataaattatcatgttaattaatttaatatctcaaaaccgagttataatatatcaataacaaaaattatatacactttttaaaattttttttgcttttaaaattttaataaaatgctcaggtagaacctgggttgattagctagtgtaaacgttatgatacaatag

SEQ ID NO: 754 - DNA, 200 bp, Conyza canadensis
atatattgcattaacaaaacataaaaagacattttataatattatattaaaaaaaatttactttgattcgaataaaagaataaatttgtagacatcataaataaaagaaaacattttgaaaatatttaatgggctatttatctttaaaaagatttttgattaaatatgacatcataaataaataaaacattttaaagaaa

SEQ ID NO: 755 - DNA, 200 bp, Conyza canadensis
tttctttaaaatgttttatttatttatgatgtcatatttaatcaaaaatctttttaaagataaatagcccattaaatattttcaaaatgttttcttttatttatgatgtctacaaatttattcttttattcgaatcaaagtaaattttttttaatataatattataaaatgtctttttatgttttgttaatgcaatatat

SEQ ID NO: 756 - DNA, 200 bp, Conyza canadensis
aaataaataaaacattttaaagaaatttgtaaacatgacacatcataattgtttttaaaaataatttaaaaagaatccttctttattatatataaagattacatattaaatatatgttgtttcaatcttacctttctttttaaataaacttagctaactttgatagtttgttttttattttttttatttttaaacaacag

SEQ ID NO: 757 - DNA, 200 bp, Conyza canadensis
ctgttgtttaaaaataaaaaaaataaaaaacaaactatcaaagttagctaagtttatttaaaaagaaaggtaagattgaaacaacatatatttaatatgtaatctttatatataataaagaaggattctttttaaattatttttaaaaacaattatgatgtgtcatgtttacaaatttctttaaaatgttttatttattt

SEQ ID NO: 758 - DNA, 200 bp, Conyza canadensis
tattttttttatttttaaacaacagattgattttattaatagttggttgaaaattgatcaaccaataaaaagaaaaaattaaatacaaagaagaggacttttcaaccattcatcccaagatatttgcttctttttatagcgataccataaaaatgaatgagttataatcgaatcaacaagaacatcatgtcttttattgg

SEQ ID NO: 759 - DNA, 200 bp, Conyza canadensis
ccaataaaagacatgatgttcttgttgattcgattataactcattcatttttatggtatcgctataaaaagaagcaaatatcttgggatgaatggttgaaaagtcctcttctttgtatttaattttttctttttattggttgatcaattttcaaccaactattaataaaatcaatctgttgtttaaaaataaaaaaaata

SEQ ID NO: 760 - DNA, 200 bp, Conyza canadensis
acaagaacatcatgtcttttattggagcaaccgaagactttataactttgatagttgagttgcgaaaatttatttaaagttcgactgggatatttctaatctactagctacaaacacttgagctaaaattgaaccttgaacatggtaagtaaatcattttggagagatttcatgctttctctgtatcttaattctatttg

SEQ ID NO: 761 - DNA, 200 bp, Conyza canadensis
caaatagaattaagatacagagaaagcatgaaatctctccaaaatgatttacttaccatgttcaaggttcaattttagctcaagtgtttgtagctagtagattagaaatatcccagtcgaactttaaataaattttcgcaactcaactatcaaagttataaagtcttcggttgctccaataaaagacatgatgttcttgt

SEQ ID NO: 762 - DNA, 200 bp, Conyza canadensis
tttctctgtatcttaattctatttgtctaattggtttggtcgcaacccgaaacatggttagaattacataaaaaacacaacgaagtgaaatccggtagctcgaccttcgttcgttgggagtttttcctcgtgtcttgggtcactgtaattggcacgaggttttttcactccttttgtagttcttacagttaatatttcag

SEQ ID NO: 763 - DNA, 200 bp, Conyza canadensis
ctgaaatattaactgtaagaactacaaaaggagtgaaaaaacctcgtgccaattacagtgacccaagacacgaggaaaaactcccaacgaacgaaggtcgagctaccggatttcacttcgttgtgttttttatgtaattctaaccatgtttcgggttgcgaccaaaccaattagacaaatagaattaagatacagagaaa

SEQ ID NO: 764 - DNA, 200 bp, Conyza canadensis
gtagttcttacagttaatatttcagaaagagtctaaatttattgtattgctttttttagattgtaattataattataccctattacaactagtgccttgctagttgtttattttaaataatattttctgtcgttctaggaaaaaaaaaattgaaccttgaacacttaatgcggaagtagttaatacttgcaaacttaagg

SEQ ID NO: 765 - DNA, 200 bp, Conyza canadensis
ccttaagtttgcaagtattaactacttccgcattaagtgttcaaggttcaattttttttttcctagaacgacagaaaatattatttaaaataaacaactagcaaggcactagttgtaatagggtataattataattacaatctaaaaaaagcaatacaataaatttagactctttctgaaatattaactgtaagaactac

SEQ ID NO: 766 - DNA, 200 bp, Conyza canadensis
gtagttaatacttgcaaacttaaggaataagttaagtaggctttgatgctatagatagtcctaagccatcactcttcaaaacacaatttacacaatatttctagaaaaatcaaaacttccatagatatgtgaaaataataaatggatgtatatacaaaaaaaaaacataataaaaaattgaaaaacttatacacgcgtac

SEQ ID NO: 767 - DNA, 200 bp, Conyza canadensis
gtacgcgtgtataagtttttcaattttttattatgttttttttttgtatatacatccatttattattttcacatatctatggaagttttgatttttctagaaatattgtgtaaattgtgttttgaagagtgatggcttaggactatctatagcatcaaagcctacttaacttattccttaagtttgcaagtattaactac

SEQ ID NO: 768 - DNA, 200 bp, Conyza canadensis
aattgaaaaacttatacacgcgtacaagccaatgattatagtctaactggttagagacattttaggtttatctaaagttttgagtcgatctttaggaatgataagtttaggttttttttttctctgaatatttataacggtccatggtcaacattttgttttctaatatacgtgcaagacttaccattatatggtgatgt

SEQ ID NO: 769 - DNA, 200 bp, Conyza canadensis
acatcaccatataatggtaagtcttgcacgtatattagaaaacaaaatgttgaccatggaccgttataaatattcagagaaaaaaaaaacctaaacttatcattcctaaagatcgactcaaaactttagataaacctaaaatgtctctaaccagttagactataatcattggcttgtacgcgtgtataagtttttcaatt

SEQ ID NO: 770 - DNA, 200 bp, Conyza canadensis
aagacttaccattatatggtgatgtttctctaatgtcacataccgaccaaatgtttgtacaaaaataaaaataaatacgtgtataaaagtcggcaaacgaaaattaaaaaaacaggatctcatacattcacttccacacacactcctcctagctctcattttttatttcctttttcatccccagcaaaaacacgcacaca

SEQ ID NO: 771 - DNA, 200 bp, Conyza canadensis
tgtgtgcgtgtttttgctggggatgaaaaaggaaataaaaaatgagagctaggaggagtgtgtgtggaagtgaatgtatgagatcctgtttttttaattttcgtttgccgacttttatacacgtatttatttttatttttgtacaaacatttggtcggtatgtgacattagagaaacatcaccatataatggtaagtctt

SEQ ID NO: 772 - DNA, 200 bp, Conyza canadensis
catccccagcaaaaacacgcacacataaattaaattcaaacgaatcaaaccctaaaaacaaccaaaaaaaaataatacaatctcacacacacattttcaaacatggcggccgtaacttcaccaaacccacctttcaccaccaccaccacaaaaccaccgcattccgccaccacatttcaccgtcccaccaccactcattt

SEQ ID NO: 773 - DNA, 200 bp, Conyza canadensis
aaatgagtggtggtgggacggtgaaatgtggtggcggaatgcggtggttttgtggtggtggtggtgaaaggtgggtttggtgaagttacggccgccatgtttgaaaatgtgtgtgtgagattgtattatttttttttggttgtttttagggtttgattcgtttgaatttaatttatgtgtgcgtgtttttgctggggatg

SEQ ID NO: 774 - DNA, 200 bp, Conyza canadensis; identical to SEQ ID NO: 706

SEQ ID NO: 775 - DNA, 200 bp, Conyza canadensis; identical to SEQ ID NO: 707

SEQ ID NO: 776 - DNA, 200 bp, Conyza canadensis; identical to SEQ ID NO: 708

SEQ ID NO: 777 - DNA, 200 bp, Conyza canadensis; identical to SEQ ID NO: 709

SEQ ID NO: 778 - DNA, 200 bp, Conyza canadensis; identical to SEQ ID NO: 710

SEQ ID NO: 779 - DNA, 200 bp, Conyza canadensis; identical to SEQ ID NO: 711

SEQ ID NO: 780 - DNA, 200 bp, Conyza canadensis; identical to SEQ ID NO: 712

SEQ ID NO: 781 - DNA, 200 bp, Conyza canadensis; identical to SEQ ID NO: 713

SEQ ID NO: 782 - DNA, 200 bp, Conyza canadensis; identical to SEQ ID NO: 714

SEQ ID NO: 783 - DNA, 200 bp, Conyza canadensis; identical to SEQ ID NO: 715

SEQ ID NO: 784 - DNA, 200 bp, Conyza canadensis; identical to SEQ ID NO: 716

SEQ ID NO: 785 - DNA, 200 bp, Conyza canadensis; identical to SEQ ID NO: 717

SEQ ID NO: 786 - DNA, 200 bp, Conyza canadensis; identical to SEQ ID NO: 718

SEQ ID NO: 787 - DNA, 200 bp, Conyza canadensis; identical to SEQ ID NO: 719

SEQ ID NO: 788 - DNA, 200 bp, Conyza canadensis; identical to SEQ ID NO: 720

SEQ ID NO: 789 - DNA, 200 bp, Conyza canadensis; identical to SEQ ID NO: 721

SEQ ID NO: 790 - DNA, 200 bp, Conyza canadensis; identical to SEQ ID NO: 722

SEQ ID NO: 791 - DNA, 200 bp, Conyza canadensis; identical to SEQ ID NO: 723

SEQ ID NO: 792 - DNA, 200 bp, Conyza canadensis; identical to SEQ ID NO: 724

SEQ ID NO: 793 - DNA, 200 bp, Conyza canadensis; identical to SEQ ID NO: 725

SEQ ID NO: 794 - DNA, 200 bp, Conyza canadensis; identical to SEQ ID NO: 726

SEQ ID NO: 795 - DNA, 200 bp, Conyza canadensis; identical to SEQ ID NO: 727

SEQ ID NO: 796 - DNA, 200 bp, Conyza canadensis; identical to SEQ ID NO: 728

SEQ ID NO: 797 - DNA, 200 bp, Conyza canadensis; identical to SEQ ID NO: 729

SEQ ID NO: 798 - DNA, 200 bp, Conyza canadensis; identical to SEQ ID NO: 730

SEQ ID NO: 799 - DNA, 200 bp, Conyza canadensis; identical to SEQ ID NO: 731

SEQ ID NO: 800 - DNA, 200 bp, Conyza canadensis; identical to SEQ ID NO: 732

SEQ ID NO: 801 - DNA, 200 bp, Conyza canadensis; identical to SEQ ID NO: 733

SEQ ID NO: 802 - DNA, 200 bp, Conyza canadensis; identical to SEQ ID NO: 734

SEQ ID NO: 803 - DNA, 200 bp, Conyza canadensis; identical to SEQ ID NO: 735

SEQ ID NO: 804 - DNA, 200 bp, Conyza canadensis; identical to SEQ ID NO: 736

SEQ ID NO: 805 - DNA, 200 bp, Conyza canadensis; identical to SEQ ID NO: 737

SEQ ID NO: 806 - DNA, 200 bp, Conyza canadensis; identical to SEQ ID NO: 738

SEQ ID NO: 807 - DNA, 200 bp, Conyza canadensis; identical to SEQ ID NO: 739

SEQ ID NO: 808 - DNA, 200 bp, Conyza canadensis; identical to SEQ ID NO: 740

SEQ ID NO: 809 - DNA, 200 bp, Conyza canadensis; identical to SEQ ID NO: 741

SEQ ID NO: 810 - DNA, 200 bp, Conyza canadensis; identical to SEQ ID NO: 742

SEQ ID NO: 811 - DNA, 200 bp, Conyza canadensis; identical to SEQ ID NO: 743

SEQ ID NO: 812 - DNA, 200 bp, Conyza canadensis; identical to SEQ ID NO: 744

SEQ ID NO: 813 - DNA, 200 bp, Conyza canadensis; identical to SEQ ID NO: 745

SEQ ID NO: 814 - DNA, 200 bp, Conyza canadensis; identical to SEQ ID NO: 746

SEQ ID NO: 815 - DNA, 200 bp, Conyza canadensis; identical to SEQ ID NO: 747

SEQ ID NO: 816 - DNA, 200 bp, Conyza canadensis
aatgggtaactttcacccaccaacatcatggcatcacgatagcttgaggtgaataaaacaagatactcttcatcaggcaacccacaccgcttcaaaactttgtttcttgcttgaatttcaggtattgagatgaagcttccaagatatgatgactttttagtaaggatatccagtaatcttgatggctcgagctgaattct

SEQ ID NO: 817 - DNA, 200 bp, Conyza canadensis
agaattcagctcgagccatcaagattactggatatccttactaaaaagtcatcatatcttggaagcttcatctcaatacctgaaattcaagcaagaaacaaagttttgaagcggtgtgggttgcctgatgaagagtatcttgttttattcacctcaagctatcgtgatgccatgatgttggtgggtgaaagttacccatt

SEQ ID NO: 818 - DNA, 200 bp, Conyza canadensis
cgtgttgtggtcatacatcaccacgacgtctgtgatggtaccgaattgatcaaagtaattcttgaaatcacttccacacacactactcctagctctcattttttatttcctttttcatccccagcaaaaacacgcacacataaattaaattcaaacgaatcaaaccctaaaaacaacaaaaaaaaataatacaatctcac

SEQ ID NO: 819 - DNA, 200 bp, Conyza canadensis
gtgagattgtattatttttttttgttgtttttagggtttgattcgtttgaatttaatttatgtgtgcgtgtttttgctggggatgaaaaaggaaataaaaaatgagagctaggagtagtgtgtgtggaagtgatttcaagaattactttgatcaattcggtaccatcacagacgtcgtggtgatgtatgaccacaacacg

SEQ ID NO: 820 - DNA, 200 bp, Conyza canadensis
acaaaaaaaaataatacaatctcacacacacattttcaaacatggcggccgtaacttcaccaaacccacctttcaccaccaccaccacaaaaccaccgcattccgccaccacatttcaccgtcccaccaccactcatttatccttcccaaccccaccaaaacgaaaccgtttccttcacatcaccaacgtcctctcggac

SEQ ID NO: 821 - DNA, 200 bp, Conyza canadensis
gtccgagaggacgttggtgatgtgaaggaaacggtttcgttttggtggggttgggaaggataaatgagtggtggtgggacggtgaaatgtggtggcggaatgcggtggttttgtggtggtggtggtgaaaggtgggtttggtgaagttacggccgccatgtttgaaaatgtgtgtgtgagattgtattatttttttttgt

SEQ ID NO: 822 - DNA, 200 bp, Conyza canadensis
tcacatcaccaacgtcctctcggaccacaaacccatcactaccaccactacaaccaccgttccaccaccttcattcacttcccgtttcgccgccgaccaaccccggaagggctccgacgttctcgtagaagccctcgaacgtgaaggcgtcaccgacgtcttcgcttaccctggtggcgcgtcaatggagatccaccaag

SEQ ID NO: 823 - DNA, 200 bp, Conyza canadensis
cttggtggatctccattgacgcgccaccagggtaagcgaagacgtcggtgacgccttcacgttcgagggcttctacgagaacgtcggagcccttccggggttggtcggcggcgaaacgggaagtgaatgaaggtggtggaacggtggttgtagtggtggtagtgatgggtttgtggtccgagaggacgttggtgatgtga

SEQ ID NO: 824 - DNA, 200 bp, Conyza canadensis
ggcgcgtcaatggagatccaccaagctctcacgcgctccaccaccatccgcaacgtcctcccccgccatgaacaaggtggcatcttcgccgcagaaggctacgcacgtgcctccggtctccccggcgtctgtatagccacttccggtcccggcgccacaaaccttgtctccggccttgctgacgcgcttcttgacagtgt

SEQ ID NO: 825 - DNA, 200 bp, Conyza canadensis
acactgtcaagaagcgcgtcagcaaggccggagacaaggtttgtggcgccgggaccggaagtggctatacagacgccggggagaccggaggcacgtgcgtagccttctgcggcgaagatgccaccttgttcatggcgggggaggacgttgcggatggtggtggagcgcgtgagagcttggtggatctccattgacgcgcc

SEQ ID NO: 826 - DNA, 200 bp, Conyza canadensis
ttgctgacgcgcttcttgacagtgtccccgtcgttgccatcaccggccaagttccccggcgaatgatcggaactgatgcttttcaagaaacacccattgttgaggtaacaagatccattactaaacataactatttggttttagatgttgatgatattccaagaattgttagagaagctttttatcttgcccggtcgggt

SEQ ID NO: 827 - DNA, 200 bp, Conyza canadensis
acccgaccgggcaagataaaaagcttctctaacaattcttggaatatcatcaacatctaaaaccaaatagttatgtttagtaatggatcttgttacctcaacaatgggtgtttcttgaaaagcatcagttccgatcattcgccggggaacttggccggtgatggcaacgacggggacactgtcaagaagcgcgtcagcaa

SEQ ID NO: 828 - DNA, 200 bp, Conyza canadensis
agctttttatcttgcccggtcgggtcgacccggacccgttttgattgatattccaaaagatatacaacaacagttatgtgtgcctaaatgggatgagcccatgaggcttcctggttatttatctaggttacctaagccacctaatgatggtttactagaacaaattgtgaggttagttggagagtcgaaaaggccggttt

SEQ ID NO: 829 - DNA, 200 bp, Conyza canadensis
aaaccggccttttcgactctccaactaacctcacaatttgttctagtaaaccatcattaggtggcttaggtaacctagataaataaccaggaagcctcatgggctcatcccatttaggcacacataactgttgttgtatatcttttggaatatcaatcaaaacgggtccgggtcgacccgaccgggcaagataaaaagct

SEQ ID NO: 830 - DNA, 200 bp, Conyza canadensis
gttggagagtcgaaaaggccggttttgtatgtaggtggtggttgtttgaattcgagtgatgagttgagacggtttgttgagcttacgggtattccggtagctagtactttaatgggtcttgggtcttatccagcttcgagtgatttgtctcttcaaatgcttggaatgcatggaactgtttatgcgaattatgctgttga

SEQ ID NO: 831 - DNA, 200 bp, Conyza canadensis
tcaacagcataattcgcataaacagttccatgcattccaagcatttgaagagacaaatcactcgaagctggataagacccaagacccattaaagtactagctaccggaatacccgtaagctcaacaaaccgtctcaactcatcactcgaattcaaacaaccaccacctacatacaaaaccggccttttcgactctccaac

SEQ ID NO: 832 - DNA, 200 bp, Conyza canadensis
ctgtttatgcgaattatgctgttgataaggcggatttgttgcttgcgtttggggttaggtttgatgaccgtgtgactggaaagcttgaagcttttgctagtagagctaagattgttcatattgatattgactctgctgagattgggaagaataagcagccacatgtgtcggtttgtggtgatattaagattgcgttacag

SEQ ID NO: 833 - DNA, 200 bp, Conyza canadensis
ctgtaacgcaatcttaatatcaccacaaaccgacacatgtggctgcttattcttcccaatctcagcagagtcaatatcaatatgaacaatcttagctctactagcaaaagcttcaagctttccagtcacacggtcatcaaacctaaccccaaacgcaagcaacaaatccgccttatcaacagcataattcgcataaacag

SEQ ID NO: 834 - DNA, 200 bp, Conyza canadensis
tggtgatattaagattgcgttacagggtcttaacaagattttagaagggaggcgtgagatgagtaatcttgatttttcggcgtggagggcagagttggatgaacaaaaggtgaaccatccgttgagttttaaaacgttcggtgaagctattccaccgcaatatgctattcaggtgcttgatgagttaacgggtgggaatg

SEQ ID NO: 835 - DNA, 200 bp, Conyza canadensis
cattcccacccgttaactcatcaagcacctgaatagcatattgcggtggaatagcttcaccgaacgttttaaaactcaacggatggttcaccttttgttcatccaactctgccctccacgccgaaaaatcaagattactcatctcacgcctcccttctaaaatcttgttaagaccctgtaacgcaatcttaatatcacca

SEQ ID NO: 836 - DNA, 200 bp, Conyza canadensis
cttgatgagttaacgggtgggaatgctattataagtactggggtcgggcaacatcagatgtgggctgctcagttttacaagtacaacagacctagacagtggttgacttcaggtggactaggggctatgggctttggactgcctgcagccattggtgcagccgttgcaagacctgatgcagtggtagtggatatcgatgg

SEQ ID NO: 837 - DNA, 200 bp, Conyza canadensis
ccatcgatatccactaccactgcatcaggtcttgcaacggctgcaccaatggctgcaggcagtccaaagcccatagcccctagtccacctgaagtcaaccactgtctaggtctgttgtacttgtaaaactgagcagcccacatctgatgttgcccgaccccagtacttataatagcattcccacccgttaactcatcaag

SEQ ID NO: 838 - DNA, 200 bp, Conyza canadensis
atgcagtggtagtggatatcgatggtgatggaagttttatcatgaatgttcaagagttggctactatccgagtggaaaatcttcctgtcaaggttttgttactcaataatcagcatttgggtatggtggttcaatgggaggatcgtttctacaaggcaaatagggcgcatacctacttggggaacccatcaaaggaggct

SEQ ID NO: 839 - DNA, 200 bp, Conyza canadensis
agcctcctttgatgggttccccaagtaggtatgcgccctatttgccttgtagaaacgatcctcccattgaaccaccatacccaaatgctgattattgagtaacaaaaccttgacaggaagattttccactcggatagtagccaactcttgaacattcatgataaaacttccatcaccatcgatatccactaccactgcat

SEQ ID NO: 840 - DNA, 200 bp, Conyza canadensis
cttggggaacccatcaaaggaggctgaaatatttccaaacatgttgaagtttgccgaagcgtgtgatataccagctgcacgagtgacccgtaaagctgatctacgggcggctattcagaagatgttggatactcctgggccttacttgttggatgtcattgtgccgcatcaagaacatgttttgccgatgattcctgctg

SEQ ID NO: 841 - DNA, 200 bp, Conyza canadensis
cagcaggaatcatcggcaaaacatgttcttgatgcggcacaatgacatccaacaagtaaggcccaggagtatccaacatcttctgaatagccgcccgtagatcagctttacgggtcactcgtgcagctggtatatcacacgcttcggcaaacttcaacatgtttggaaatatttcagcctcctttgatgggttccccaag

SEQ ID NO: 842 - DNA, 200 bp, Conyza canadensis
catgttttgccgatgattcctgctggtgggggcttcatggatgtgatcaccgagggtgatggtagaacgaagtattgagcttcaaagtcacaacttagtttcaagtttcaaccactgtatgtaaacatctagcatctttacttaagaggtgtgagcagtttgttggatttgaagttaatttcttgttgtgtattttagtt

SEQ ID NO: 843 - DNA, 200 bp, Conyza canadensis
aactaaaatacacaacaagaaattaacttcaaatccaacaaactgctcacacctcttaagtaaagatgctagatgtttacatacagtggttgaaacttgaaactaagttgtgactttgaagctcaatacttcgttctaccatcaccctcggtgatcacatccatgaagcccccaccagcaggaatcatcggcaaaacatg

SEQ ID NO: 844 - DNA, 200 bp, Digitaria sanguinalis
cgttgataaactgatccataacatttttaaccaggaacgaaattacacaacaaaacattaacttcaaaaccgacaaactgcttacagaacacactatatgtgacattgaagctcaatatttcattctgccgtcgccttcggtgatcacatccatgaaacctccaccagccgggatcatgggcaacacatgttcttgatgg

SEQ ID NO: 845 - DNA, 200 bp, Digitaria sanguinalis
ccatcaagaacatgtgttgcccatgatcccggctggtggaggtttcatggatgtgatcaccgaaggcgacggcagaatgaaatattgagcttcaatgtcacatatagtgtgttctgtaagcagtttgtcggttttgaagttaatgttttgttgtgtaatttcgttcctggttaaaaatgttatggatcagtttatcaacg

SEQ ID NO: 846 - DNA, 200 bp, Digitaria sanguinalis
catgggcaacacatgttcttgatggggcacgatcacatccaacaagtaaggccccggtgtatccaacatcttctgaatagctgctcgtagatctgccttccgggtcactcgggcagctgggatatcacacgcttcagcaaacttcaacatgttagggaatatttcagactcttttgacggatttcctaagtaggtatgag

SEQ ID NO: 847 - DNA, 200 bp, Digitaria sanguinalis
ctcatacctacttaggaaatccgtcaaaagagtctgaaatattccctaacatgttgaagtttgctgaagcgtgtgatatcccagctgcccgagtgacccggaaggcagatctacgagcagctattcagaagatgttggatacaccggggccttacttgttggatgtgatcgtgccccatcaagaacatgtgttgcccatg

SEQ ID NO: 848 - DNA, 200 bp, Digitaria sanguinalis
gacggatttcctaagtaggtatgagcccgattcgccttgtaaaaccgatcctcccactgaaccaccatacccaaatgctgattgttaagtaacaaaatcttaacaggaagattttcaacacggattgtggctaactcttgaacgttcattataaagcttccatcaccatcgatatcaactactaccgcatcaggtcttgc

SEQ ID NO: 849 - DNA, 200 bp, Digitaria sanguinalis
gcaagacctgatgcggtagtagttgatatcgatggtgatggaagctttataatgaacgttcaagagttagccacaatccgtgttgaaaatcttcctgttaagattttgttacttaacaatcagcatttgggtatggtggttcagtgggaggatcggttttacaaggcgaatcgggctcatacctacttaggaaatccgtc

SEQ ID NO: 850 - DNA, 200 bp, Digitaria sanguinalis
caactactaccgcatcaggtcttgcaacagccgccccgatagcagcgggcaacccaaaacccatcgcccctagtccacctgacgtcagccattgtctaggcttgttgtatttgtaaaactgagcagcccacatctgatgctgcccgaccccagtgctaataatcgcattcccacccgttaactcatcaagcacttgaatg

SEQ ID NO: 851 - DNA, 200 bp, Digitaria sanguinalis
cattcaagtgcttgatgagttaacgggtgggaatgcgattattagcactggggtcgggcagcatcagatgtgggctgctcagttttacaaatacaacaagcctagacaatggctgacgtcaggtggactaggggcgatgggttttgggttgcccgctgctatcggggcggctgttgcaagacctgatgcggtagtagttg

SEQ ID NO: 852 - DNA, 200 bp, Digitaria sanguinalis
cgttaactcatcaagcacttgaatggcatactgcggaggaatagcttcgccaaatgttttaaaactcaacggatacttaaccttttgctcatccaattccttcctccagttcgagaaatcaagattagtcaccgaattctttacctccaaaatcttgttcagaccctgtaacgcgaccttaatatcaccacaaatcgaca

SEQ ID NO: 853 - DNA, 200 bp, Digitaria sanguinalis
tgtcgatttgtggtgatattaaggtcgcgttacagggtctgaacaagattttggaggtaaagaattcggtgactaatcttgatttctcgaactggaggaaggaattggatgagcaaaaggttaagtatccgttgagttttaaaacatttggcgaagctattcctccgcagtatgccattcaagtgcttgatgagttaacg

SEQ ID NO: 854 - DNA, 200 bp, Digitaria sanguinalis
accttaatatcaccacaaatcgacacatgaggctgcttattcttcccaatttccgcagaatcaatatcaatatgaacaatcttagctctgctagcaaaagcctcaagcttccccgtcacacggtcatcaaaccttaccccaaacgcaagcaacaaatcactcttatcaaccgcataattcgcataaaccgtcccatgcat

SEQ ID NO: 855 - DNA, 200 bp, Digitaria sanguinalis
atgcatgggacggtttatgcgaattatgcggttgataagagtgatttgttgcttgcgtttggggtaaggtttgatgaccgtgtgacggggaagcttgaggcttttgctagcagagctaagattgttcatattgatattgattctgcggaaattgggaagaataagcagcctcatgtgtcgatttgtggtgatattaaggt

SEQ ID NO: 856 - DNA, 200 bp, Digitaria sanguinalis
aattcgcataaaccgtcccatgcatcccaagcatatgcagcgacaaatcactagaagcagggtatgctccaagccccatcaacgtactcgcaaccggtatccccgtaagctccacaaaccaagaaaaggacgctgatgttctcgtcgaagctctggaacgtgaaggcgttacagacgtcttcgcttacccaggtggcgcc

SEQ ID NO: 857 - DNA, 200 bp, Digitaria sanguinalis
ggcgccacctgggtaagcgaagacgtctgtaacgccttcacgttccagagcttcgacgagaacatcagcgtccttttcttggtttgtggagcttacggggataccggttgcgagtacgttgatggggcttggagcataccctgcttctagtgatttgtcgctgcatatgcttgggatgcatgggacggtttatgcgaatt

SEQ ID NO: 858 - DNA, 200 bp, Digitaria sanguinalis
cgtcttcgcttacccaggtggcgcctccatggagatccaccaagctctcacgcgctcaccaccatccgcaacgttctcccacgtcacgaacagggcggcgtctttgctgccgaaggctacgcacgtgcctccggtcttcccggcgtctgtattgcaacctctggtcctggagctacgaacctagtaagtggtcttgctga

SEQ ID NO: 859 - DNA, 200 bp, Digitaria sanguinalis
tcagcaagaccacttactaggttcgtagctccaggaccagaggttgcaatacagacgccgggaagaccggaggcacgtgcgtagccttcggcagcaaagacgccgccctgttcgtgacgtgggagaacgttgcggatggtggtgagcgcgtgagagcttggtggatctccatggaggcgccacctgggtaagcgaagacg

SEQ ID NO: 860 - DNA, 200 bp, Digitaria sanguinalis
cgaacctagtaagtggtcttgctgatgctttattagacagtgttccaatggttgctattactggtcaagttcccaggagaatgattggaacagatgcgtttcaagaaacccctattgttgaggtaacacgttccattactaagcataattatttagttttggatgtcgaggatattcccaggattgttagggaagctttt

SEQ ID NO: 861 - DNA, 200 bp, Digitaria sanguinalis
aaaagcttccctaacaatcctgggaatatcctcgacatccaaaactaaataattatgcttagtaatggaacgtgttacctcaacaataggggtttcttgaaacgcatctgttccaatcattctcctgggaacttgaccagtaatagcaaccattggaacactgtctaataaagcatcagcaagaccacttactaggttcg

SEQ ID NO: 862 - DNA, 200 bp, Digitaria sanguinalis
tcccaggattgttagggaagctttttatcttgcgtcttctggtcgacccggaccggttttaattgatgtacctaaggatatacagcagcagttggtagtgcctaaatgggatgagcctattaggttacctgggtatttgtctaggttgcctaaaacggagaataatgggcagttggaacagattgttaggttggtgagtg

SEQ ID NO: 863 - DNA, 200 bp, Digitaria sanguinalis
cactcaccaacctaacaatctgttccaactgcccattattctccgttttaggcaacctagacaaatacccaggtaacctaataggctcatcccatttaggcactaccaactgctgctgtatatccttaggtacatcaattaaaaccggtccgggtcgaccagaagacgcaagataaaaagcttccctaacaatcctggga

SEQ ID NO: 864 - DNA, 200 bp, Digitaria sanguinalis
ggagtagggaccacatacaacagagtatgatactatacaatgcatctaaaccatgattcaagaatataatcatatggtaatcatgcattaggatccactgacagcagcagatctttgtatggttatatgttcatattccgatggacaatttaacaaacaaaacaaatccttgtggatccattgtggggatattcattttc

SEQ ID NO: 865 - DNA, 200 bp, Digitaria sanguinalis
gaaaatgaatatccccacaatggatccacaaggatttgttttgtttgttaaattgtccatcggaatatgaacatataaccatacaaagatctgctgctgtcagtggatcctaatgcatgattaccatatgattatattcttgaatcatggtttagatgcattgtatagtatcatactctgttgtatgtggtccctactcc

SEQ ID NO: 866 - DNA, 200 bp, Digitaria sanguinalis
atccattgtggggatattcattttctcagtacaagacacattgaacaaatggttagacaaacccttgtcttcccttcctcctctggttaagaagaagtcttcaatctcactcagagcccaaagaacacaatctataaaaaattgaaacgaaaggcctaataagagtatatcaatatacactaggttacatgtgtttgcaa

SEQ ID NO: 867 - DNA, 200 bp, Digitaria sanguinalis
ttgcaaacacatgtaacctagtgtatattgatatactcttattaggcctttcgtttcaattttttatagattgtgttctttgggctctgagtgagattgaagacttcttcttaaccagaggaggaagggaagacaagggtttgtctaaccatttgttcaatgtgtcttgtactgagaaaatgaatatccccacaatggat

SEQ ID NO: 868 - DNA, 200 bp, Digitaria sanguinalis
tacactaggttacatgtgtttgcaaccagggtcgtgaaagccaatgctactaagtagttttatccattacatggaactcaatattcaagaaaaaacatatccatgattgcaactacaattttaaccatatgtgactactgaaaatcaaaacttttgcaggaacattgcagctatccacagctccactatcccctgaattg

SEQ ID NO: 869 - DNA, 200 bp, Digitaria sanguinalis
caattcaggggatagtggagctgtggatagctgcaatgttcctgcaaaagttttgattttcagtagtcacatatggttaaaattgtagttgcaatcatggatatgttttttcttgaatattgagttccatgtaatggataaaactacttagtagcattggctttcacgaccctggttgcaaacacatgtaacctagtgta

SEQ ID NO: 870 - DNA, 200 bp, Digitaria sanguinalis
cacagctccactatcccctgaattgctggattgtgatcctttatatttttttttccagagcccgctagaaccataaactgatacaaatcaaacatacgagttaattttactaggattgaaatttttatacggcagatcataaaaccatccatcgctttgaaatggtaatttaatcaatcatgccaacacgacagtacagg

SEQ ID NO: 871 - DNA, 200 bp, Digitaria sanguinalis
cctgtactgtcgtgttggcatgattgattaaattaccatttcaaagcgatggatggttttatgatctgccgtataaaaatttcaatcctagtaaaattaactcgtatgtttgatttgtatcagtttatggttctagcgggctctggaaaaaaaaatataaaggatcacaatccagcaattcaggggatagtggagctgtg

SEQ ID NO: 872 - DNA, 200 bp, Digitaria sanguinalis
aatcatgccaacacgacagtacaggacatgcttatatgcacaaaccatatacgtggcctaaaactcttcagggcagttattcaaaaaccaaaccaacagaggcacctactagggttttacatatctgacaagacgcgtcatgatcacttgagccaggcaaaatatcccaaggggatcacaaatatcatattttattctgg

SEQ ID NO: 873 - DNA, 200 bp, Digitaria sanguinalis
ccagaataaaatatgatatttgtgatccccttgggatattttgcctggctcaagtgatcatgacgcgtcttgtcagatatgtaaaaccctagtaggtgcctctgttggtttggtttttgaataactgccctgaagagttttaggccacgtatatggtttgtgcatataagcatgtcctgtactgtcgtgttggcatgatt

SEQ ID NO: 874 - DNA, 200 bp, Digitaria sanguinalis
tcacaaatatcatattttattctggttgtctcactccgtcaagcacaggctatcaaggaacaataaacaaaaactgccctcattgatcaagaccgcctaataatattgcaaagctcagacctatcgccagcgaaacacaagaagggtctaaatttatcctgaaattaagaaagaaataaaattaaacaagcatgacagtt

SEQ ID NO: 875 - DNA, 200 bp, Digitaria sanguinalis
aactgtcatgcttgtttaattttatttctttcttaatttcaggataaatttagacccttcttgtgtttcgctggcgataggtctgagctttgcaatattattaggcggtcttgatcaatgagggcagtttttgtttattgttccttgatagcctgtgcttgacggagtgagacaaccagaataaaatatgatatttgtga

SEQ ID NO: 876 - DNA, 200 bp, Digitaria sanguinalis
ataaaattaaacaagcatgacagttcctctcactgtagggtttgcagcattgcttgaagatgtgccgaaaggggagggaacagagcggggggtgggaggtgacctctgtagtcgacgccggagttgagcttgacgacgacgggtcggcccctgatggacttgagaaagtccgacggcgtcttcaccgccccgccgcccga

SEQ ID NO: 877 - DNA, 200 bp, Digitaria sanguinalis
tcgggcggcggggcggtgaagacgccgtcggactttctcaagtccatcaggggccgacccgtcgtcgtcaagctcaactccggcgtcgactacagaggtcacctcccaccccccgctctgttccctcccctttcggcacatcttcaagcaatgctgcaaaccctacagtgagaggaactgtcatgcttgtttaattttat

SEQ ID NO: 878 - DNA, 200 bp, Digitaria sanguinalis
gcgtcttcaccgccccgccgcccgagccgggcttgtcgccgccgccgctgctcatcttgcgcgctatgcccgtgtgttcgcgcatcgcgggcgagaggcgacccgtttgggctccggattggcggatcccttcgtgccgacctcgtccggtccacccgtttagctggaccccacgtgccagtgagcatacaggaaaacga

SEQ ID NO: 879 - DNA, 200 bp, Digitaria sanguinalis
tcgttttcctgtatgctcactggcacgtggggtccagctaaacgggtggaccggacgaggtcggcacgaagggatccgccaatccggagcccaaacgggtcgcctctcgcccgcgatgcgcgaacacacgggcatagcgcgcaagatgagcagcggcggcggcgacaagcccggctcgggcggcggggcggtgaagacgc

SEQ ID NO: 880 - DNA, 200 bp, Digitaria sanguinalis
tgccagtgagcatacaggaaaacgacagtcgacaaccacgtccgcagtccagtccaaatcgttttttacttcaccatgtcgttaccagcgcacctttctaaagtcactgacacgtcggtcccacgtaggcttgccccaccggtcagtgtgaagcgtgtatacacgtttgtggaggtgtcgccgtcgctttacggcagcca

SEQ ID NO: 881 - DNA, 200 bp, Digitaria sanguinalis
tggctgccgtaaagcgacggcgacacctccacaaacgtgtatacacgcttcacactgaccggtggggcaagcctacgtgggaccgacgtgtcagtgactttagaaaggtgcgctggtaacgacatggtgaagtaaaaaacgatttggactggactgcggacgtggttgtcgactgtcgttttcctgtatgctcactggca

SEQ ID NO: 882 - DNA, 200 bp, Digitaria sanguinalis
tgtcgccgtcgctttacggcagccatccatgatccatctcaaccacacatctcgcacgcaaataaagtaagccagccaggcacgccctccccactctccccatctccgtgccaccccccaaagtctcaaaccctcgccgccgcctccgagacagccgccgccaccatggccacgacgaccgccgccgccaccgccgcggc

SEQ ID NO: 883 - DNA, 200 bp, Digitaria sanguinalis
gccgcggcggtggcggcggcggtcgtcgtggccatggtggcggcggctgtctcggaggcggcggcgagggtttgagactttggggggtggcacggagatggggagagtggggagggcgtgcctggctggcttactttatttgcgtgcgagatgtgtggttgagatggatcatggatggctgccgtaaagcgacggcgaca

SEQ ID NO: 884 - DNA, 200 bp, Digitaria sanguinalis
cgaccgccgccgccaccgccgcggccgccgcgctgaccagcaccaccaccacctccgcgcgcaggccgaggagccgacccgcgcccctcccgttcgcccgtcgcgccgggcccatccggtgctccgcggcgtcgccggtgacggccccggccacccccgccacaccgctccggccgtggggccccaccgagccccgcaag

SEQ ID NO: 885 - DNA, 200 bp, Digitaria sanguinalis
cttgcggggctcggtggggccccacggccggagcggtgtggcgggggtggccggggccgtcaccggcgacgccgcggagcaccggatgggcccggcgcgacgggcgaacgggaggggcgcgggtcggctcctcggcctgcgcgcggaggtggtggtggtgctggtcagcgcggcggccgcggcggtggcggcggcggtcg

SEQ ID NO: 886 - DNA, 200 bp, Digitaria sanguinalis
gtggggccccaccgagccccgcaagggcgccgacatcctcgtcgaggccctcgagcgctgcggcgtccgcgatgtcttcgcctaccccggcggcgcgtccatggagatccaccaggcgctcacccgctcccccgtcatcgccaaccacctcttccgccacgagcaaggggaggccttcgctgcctccgggtacgcgcgct

SEQ ID NO: 887 - DNA, 200 bp, Digitaria sanguinalis
agcgcgcgtacccggaggcagcgaaggcctccccttgctcgtggcggaagaggtggttggcgatgacgggggagcgggtgagcgcctggtggatctccatggacgcgccgccggggtaggcgaagacatcgcggacgccgcagcgctcgagggcctcgacgaggatgtcggcgcccttgcggggctcggtggggccccac

SEQ ID NO: 888 - DNA, 200 bp, Digitaria sanguinalis
ttcgctgcctccgggtacgcgcgctcctccggccgcgtcggcgtctgcgtcgccacctcgggccccggcgccaccaacctcgtctccgcgctcgccgacgcgctgctcgattcggtgcccatggtcgccatcacggggcaggtgccccgccgcatgatcggcaccgacgctttccaggagacgccgatcgtcgaggttac

SEQ ID NO: 889 - DNA, 200 bp, Digitaria sanguinalis
gtaacctcgacgatcggcgtctcctggaaagcgtcggtgccgatcatgcggcggggcacctgccccgtgatggcgaccatgggcaccgaatcgagcagcgcgtcggcgagcgcggagacgaggttggtggcgccggggcccgaggtggcgacgcagacgccgacgcggccggaggagcgcgcgtacccggaggcagcgaa

SEQ ID NO: 890 - DNA, 200 bp, Digitaria sanguinalis
aggagacgccgatcgtcgaggttacccgctcaatcaccaagcacaactacctggtcctcgacgtcgaagacatcccccgcgttgtgcaggaggcgttcttcctcgcctcctctggtcgccccgggccggtgctcgtggacatccccaaggatatccagcagcagatggcggtgccggtctggaacacgcccatgagtctg

SEQ ID NO: 891 - DNA, 200 bp, Digitaria sanguinalis
cagactcatgggcgtgttccagaccggcaccgccatctgctgctggatatccttggggatgtccacgagcaccggcccggggcgaccagaggaggcgaggaagaacgcctcctgcacaacgcgggggatgtcttcgacgtcgaggaccaggtagttgtgcttggtgattgagcgggtaacctcgacgatcggcgtctcct

SEQ ID NO: 892 - DNA, 200 bp, Digitaria sanguinalis
ggtctggaacacgcccatgagtctgccagggtacattgcgcgactccccaagcctcctgcgactgaattgcttgagcaggtgctgcgtcttgttggtgagtcacgccgccctgttctttatgttggtggtggctgcgcggcatccggtgaggagttgcgccgctttgtggagatgaccggaatcccagtgacaactactc

SEQ ID NO: 893 - DNA, 200 bp, Digitaria sanguinalis
gagtagttgtcactgggattccggtcatctccacaaagcggcgcaactcctcaccggatgccgcgcagccaccaccaacataaagaacagggcggcgtgactcaccaacaagacgcagcacctgctcaagcaattcagtcgcaggaggcttggggagtcgcgcaatgtaccctggcagactcatgggcgtgttccagacc

SEQ ID NO: 894 - DNA, 200 bp, Digitaria sanguinalis
accggaatcccagtgacaactactctgatgggccttggcaactttccccagtgacgacccactgtctctccggatgcttggtatgcatggtaccgtgtatgcaaattatgcggtggataaggccgacctgttgcttgcatttggtgtgcggttcgatgatcgtgtgacagggaaaattgaggcttttgcaagcagggcta

SEQ ID NO: 895 - DNA, 200 bp, Digitaria sanguinalis
tagccctgcttgcaaaagcctcaattttccctgtcacacgatcatcgaaccgcacaccaaatgcaagcaacaggtcggccttatccaccgcataatttgcatacacggtaccatgcataccaagcatccggagagacagtgggtcgtcactggggaaagttgccaaggcccatcagagtagttgtcactgggattccggt

SEQ ID NO: 896 - DNA, 200 bp, Digitaria sanguinalis
attgaggcttttgcaagcagggctaagattgtgcacattgacattgatccagctgagattggtaagaacaagcagccacatgtgtccatctgtgcggatgtcaagcttgctttgcagggcatgaatgctcttctggaaggaatcacatcaaagaagagtttcgactttggcccatggcaagatgagttggatcagcagaa

SEQ ID NO: 897 - DNA, 200 bp, Digitaria sanguinalis
ttctgctgatccaactcatcttgccatgggccaaagtcgaaactcttctttgatgtgattccttccagaagagcattcatgccctgcaaagcaagcttgacatccgcacagatggacacatgtggctgcttgttcttaccaatctcagctggatcaatgtcaatgtgcacaatcttagccctgcttgcaaaagcctcaat

SEQ ID NO: 898 - DNA, 200 bp, Digitaria sanguinalis
ggcaagatgagttggatcagcagaagagggaattccccctagggtacaaatctttcgatgaggagatccagccacaatacgctatccaggttctggatgagctgacaaaaggggaggccatcattgctaccggtgttgggcagcaccagatgtgggcagcacagtactacacttacaagcggccacggcaatggttgtct

SEQ ID NO: 899 - DNA, 200 bp, Digitaria sanguinalis
agacaaccattgccgtggccgcttgtaagtgtagtactgtgctgcccacatctggtgctgcccaacaccggtagcaatgatggcctccccttttgtcagctcatccagaacctggatagcgtattgtggctggatctcctcatcgaaagatttgtaccctagggggaattccctcttctgctgatccaactcatcttgcc

SEQ ID NO: 900 - DNA, 200 bp, Digitaria sanguinalis
caagcggccacggcaatggttgtcttcagctggtcttggtgctatgggatttggtttgccggctgcggctggtgctgctgtggccaacccaggtgtaacagttgttgacatcgatggggatggtagcttccaaatgaacattcaggagttggctttgattcatattgagaaccttccagtgaaggtctttgtgctaaaca

SEQ ID NO: 901 - DNA, 200 bp, Digitaria sanguinalis
tgtttagcacaaagaccttcactggaaggttctcaatatgaatcaaagccaactcctgaatgttcatttggaagctaccatccccatcgatgtcaacaactgttacacctgggttggccacagcagcaccagccgcagccggcaaaccaaatcccatagcaccaagaccagctgaagacaaccattgccgtggccgcttg

SEQ ID NO: 902 - DNA, 200 bp, Digitaria sanguinalis
ccagtgaaggtctttgtgctaaacaaccagcacctgggaatggtggtgcagtgggaggacaggttctacaaagccaaccgagcacacacatacttggggaacccagataatgagagtgagatatatccggattttgtgacgattgccaaaggattcaacatcccagcagcccgtgtgacaaagaagagcgacgtccgtgc

SEQ ID NO: 903 - DNA, 200 bp, Digitaria sanguinalis
gcacggacgtcgctcttctttgtcacacgggctgctgggatgttgaatcctttggcaatcgtcacaaaatccggatatatctcactctcattatctgggttccccaagtatgtgtgtgctcggttggctttgtagaacctgtcctcccactgcaccaccattcccaggtgctggttgtttagcacaaagaccttcactgg

SEQ ID NO: 904 - DNA, 200 bp, Digitaria sanguinalis
tgacaaagaagagcgacgtccgtgcagcaatcaagaagatgcttgagactccaggtccctacctgttggatatcatcgtcccacaccaggagcatgtgttacctatgatcccgagtggtggcgctttcaaggatatgatactggatggtgatggcaggaccgtgtattgatctgaacttcagcgagtgctgttcttgcct

SEQ ID NO: 905 - DNA, 200 bp, Digitaria sanguinalis
aggcaagaacagcactcgctgaagttcagatcaatacacggtcctgccatcaccatccagtatcatatccttgaaagcgccaccactcgggatcataggtaacacatgctcctggtgtgggacgatgatatccaacaggtagggacctggagtctcaagcatcttcttgattgctgcacggacgtcgctcttctttgtca

SEQ ID NO: 906 - DNA, 200 bp, Digitaria sanguinalis
acttcagcgagtgctgttcttgcctttctttgacatgcatatgagctagtaaaagagtgatgcgtgtcttacctatgtaatgttctcctttgtttcttcgattcctagggcgtcaactctggactgcgtcattttctaatgtgcttgtctgatgtactctggtgtggtaatcttagcttccaaccttctagtcctgcagt

SEQ ID NO: 907 - DNA, 200 bp, Digitaria sanguinalis
actgcaggactagaaggttggaagctaagattaccacaccagagtacatcagacaagcacattagaaaatgacgcagtccagagttgacgccctaggaatcgaagaaacaaaggagaacattacataggtaagacacgcatcactcttttactagctcatatgcatgtcaaagaaaggcaagaacagcactcgctgaagt

SEQ ID NO: 908 - DNA, 200 bp, Digitaria sanguinalis
gcttccaaccttctagtcctgcagtctgttgttatcgttagtgcaggcatatatgcatcataagagatcatgtaagtgccttttgctacataataaataagttaataaatgctgctatatatgcagtgggttctgaattctgttcagttgccaactagttgttgcttttgttctcgatttctttcccttgtttctacgat

SEQ ID NO: 909 - DNA, 200 bp, Digitaria sanguinalis
atcgtagaaacaagggaaagaaatcgagaacaaaagcaacaactagttggcaactgaacagaattcagaacccactgcatatatagcagcatttattaacttatttattatgtagcaaaaggcacttacatgatctcttatgatgcatatatgcctgcactaacgataacaacagactgcaggactagaaggttggaagc

SEQ ID NO: 910 - DNA, 200 bp, Digitaria sanguinalis
gatttctttcccttgtttctacgattctcctttagctgattccaattcagcataggagtatgttgtatgaaagcattgagcaattgtgcatgaaaggatagggtgtacagcggtgcagcgcacaaggcactcaccgaaaatcagcttgagctgcacaaaggaaccatctccaaacatctgtgcatgaaacactgttgcat

SEQ ID NO: 911 - DNA, 200 bp, Digitaria sanguinalis
atgcaacagtgtttcatgcacagatgtttggagatggttcctttgtgcagctcaagctgattttcggtgagtgccttgtgcgctgcaccgctgtacaccctatcctttcatgcacaattgctcaatgctttcatacaacatactcctatgctgaattggaatcagctaaaggagaatcgtagaaacaagggaaagaaatc

SEQ ID NO: 912 - DNA, 200 bp, Digitaria sanguinalis
atctgtgcatgaaacactgttgcatttctcattgcgatgtacgcgggcacgctggtcaaagaaagttcagcgccttccaagacaccggagcagtgcagggttgtgaacaaagatcacagctgcggcctttcgcggatggtgaagaagatatgctggagcaacgatcagtatggttcccacggaagaagaaaaggtaaagc

SEQ ID NO: 913 - DNA, 200 bp, Digitaria sanguinalis
gctttaccttttcttcttccgtgggaaccatactgatcgttgctccagcatatcttcttcaccatccgcgaaaggccgcagctgtgatctttgttcacaaccctgcactgctccggtgtcttggaaggcgctgaactttctttgaccagcgtgcccgcgtacatcgcaatgagaaatgcaacagtgtttcatgcacagat

SEQ ID NO: 914 - DNA, 200 bp, Digitaria sanguinalis
cccacggaagaagaaaaggtaaagctgttacagatgctgggccacacaagtagacttgtcaatctggcccaataagactttgggcctccaagatttgggcccgtatttttggaccaagacaaggcctcattacgaatttcgaggtgttaaaaaaatcacgaatttctatgctagaagatgttttaggtgtgggtgcttct

SEQ ID NO: 915 - DNA, 200 bp, Digitaria sanguinalis
agaagcacccacacctaaaacatcttctagcatagaaattcgtgatttttttaacacctcgaaattcgtaatgaggccttgtcttggtccaaaaatacgggcccaaatcttggaggcccaaagtcttattgggccagattgacaagtctacttgtgtggcccagcatctgtaacagctttaccttttcttcttccgtggg

SEQ ID NO: 916 - DNA, 200 bp, Digitaria sanguinalis
agatgttttaggtgtgggtgcttctttgataccatcattaagaactaaaaatcctctcctacgcgtatgagtgtttaaataggcccaacgcccttgttacatagtacgctgagcacctgaagcaaactttggacatcctttcctttgtaaaagcagccatcccataagacatggcaaaaactagacctttcagtacttgt

SEQ ID NO: 917 - DNA, 200 bp, Digitaria sanguinalis
acaagtactgaaaggtctagtttttgccatgtcttatgggatggctgcttttacaaaggaaaggatgtccaaagtttgcttcaggtgctcagcgtactatgtaacaagggcgttgggcctatttaaacactcatacgcgtaggagaggatttttagttcttaatgatggtatcaaagaagcacccacacctaaaacatct

SEQ ID NO: 918 - DNA, 200 bp, Digitaria sanguinalis
aaaaactagacctttcagtacttgtacttctctattaaggccctagaatcaagtttcagatgaggaagctcaattaagaatgtgtttagattgggagagaaaacactgtagatcgtggtaggtgtaagtggatgaatagtaaaaagtttgatgaataatagaaaattaatgataaacagtaaaaagtgcgttggagccta

SEQ ID NO: 919 - DNA, 200 bp, Digitaria sanguinalis
taggctccaacgcactttttactgtttatcattaattttctattattcatcaaactttttactattcatccacttacacctaccacgatctacagtgttttctctcccaatctaaacacattcttaattgagcttcctcatctgaaacttgattctagggccttaatagagaagtacaagtactgaaaggtctagttttt

SEQ ID NO: 920 - DNA, 200 bp, Digitaria sanguinalis
acagtaaaaagtgcgttggagcctaagcttattgggacctcactggtcaatccacgagtttctatctcgtgaatcgtgatccattttgtgccattgatgagagacggcaaagggcgcgcctcactataccaaaaaaaaaaaaaaactcccttctgttggaccggacaaaagagagaaagaatcgatgagcgcgatatatg

SEQ ID NO: 921 - DNA, 200 bp, Digitaria sanguinalis
catatatcgcgctcatcgattctttctctcttttgtccggtccaacagaagggagtttttttttttttttggtatagtgaggcgcgccctttgccgtctctcatcaatggcacaaaatggatcacgattcacgagatagaaactcgtggattgaccagtgaggtcccaataagcttaggctccaacgcactttttactgt

SEQ ID NO: 922 - DNA, 200 bp, Digitaria sanguinalis
aaagaatcgatgagcgcgatatatggtgactggatcataattgttgctgggctatgctcaccgaacgggcccgtacagaggcccttgccattaactgctaggatctcgactttttctttatcagattcgttcgtccatgatcggacggacaaatgcacagcaaaacgtccattcagagcgtggcggagattacatcattg

SEQ ID NO: 923 - DNA, 200 bp, Digitaria sanguinalis
caatgatgtaatctccgccacgctctgaatggacgttttgctgtgcatttgtccgtccgatcatggacgaacgaatctgataaagaaaaagtcgagatcctagcagttaatggcaagggcctctgtacgggcccgttcggtgagcatagcccagcaacaattatgatccagtcaccatatatcgcgctcatcgattcttt

SEQ ID NO: 924 - DNA, 200 bp, Digitaria sanguinalis
gagcgtggcggagattacatcattgcactatgtacacaccacagtgttgatcacgcatttctcctgcaaagacgacgaaattgtaggcacacggcgtcacgtaacaacgacgtgaagcccagctaccgtgcgaccgtacgttcgtgcacgtgtcggctaaatagggagcaacgtgttgccaaaacattttcaagagccct

SEQ ID NO: 925 - DNA, 200 bp, Digitaria sanguinalis
agggctcttgaaaatgttttggcaacacgttgctccctatttagccgacacgtgcacgaacgtacggtcgcacggtagctgggcttcacgtcgttgttacgtgacgccgtgtgcctacaatttcgtcgtctttgcaggagaaatgcgtgatcaacactgtggtgtgtacatagtgcaatgatgtaatctccgccacgctc

SEQ ID NO: 926 - DNA, 200 bp, Digitaria sanguinalis
ttgccaaaacattttcaagagccctcaaggtttgagcacggctactttttcttttcttttctttttttgccgaaaatgaacttcatggatcttagcagatatttaaattgaacatatgtcgtagctatgtatttggcacaagaaaaatgttgtggccgtttgaatttagtaaatgtagagagcctccccatgcatacctg

SEQ ID NO: 927 - DNA, 200 bp, Digitaria sanguinalis
caggtatgcatggggaggctctctacatttactaaattcaaacggccacaacatttttcttgtgccaaatacatagctacgacatatgttcaatttaaatatctgctaagatccatgaagttcattttcggcaaaaaaagaaaagaaaagaaaaagtagccgtgctcaaaccttgagggctcttgaaaatgttttggcaa

SEQ ID NO: 928 - DNA, 200 bp, Euphorbia heterophylla
caatccaccaccccccgccgctctctccaaatctccaactccactcccaaacccacaatccccgccccctccgtcccctccgccccccaaacccctcccccgcggttcgcccccgacgagccccgcaagggcgccgacattctcgtcgaggccctggagcgccagggcgtcaccgacgtgttcgcctaccccggcggcgc

SEQ ID NO: 929 - DNA, 200 bp, Euphorbia heterophylla
gcgccgccggggtaggcgaacacgtcggtgacgccctggcgctccagggcctcgacgagaatgtcggcgcccttgcggggctcgtcgggggcgaaccgcgggggaggggtttggggggcggaggggacggagggggcggggattgtgggtttgggagtggagttggagatttggagagagcggcggggggtggtggattg

SEQ ID NO: 930 - DNA, 200 bp, Euphorbia heterophylla
acgtgttcgcctaccccggcggcgcctcaatggagatccaccaagccctaacccgctccccaaccatccgcaacgtcctcccccgccacgagcagggcggcgtcttcgccgctgaaggatacgcccgcgcctccggcaagcccggcgtgtgcatcgcgacctccggcccaggcgccaccaatctcgtcagcggcctcgcc

SEQ ID NO: 931 - DNA, 200 bp, Euphorbia heterophylla
ggcgaggccgctgacgagattggtggcgcctgggccggaggtcgcgatgcacacgccgggcttgccggaggcgcgggcgtatccttcagcggcgaagacgccgccctgctcgtggcgggggaggacgttgcggatggttggggagcgggttagggcttggtggatctccattgaggcgccgccggggtaggcgaacacgt

SEQ ID NO: 932 - DNA, 200 bp, Euphorbia heterophylla
caccaatctcgtcagcggcctcgccgatgcgctcctcgacagcgtccccattgtggccatcaccggccaggtgcctcgccggatgatcggaaccgacgccttccaggaaactccgattgttgaggtaactcgatccataacgaagcacaattatttggtacttgatattgaggatatccctaggattgtgagtgaggctt

SEQ ID NO: 933 - DNA, 200 bp, Euphorbia heterophylla
aagcctcactcacaatcctagggatatcctcaatatcaagtaccaaataattgtgcttcgttatggatcgagttacctcaacaatcggagtttcctggaaggcgtcggttccgatcatccggcgaggcacctggccggtgatggccacaatggggacgctgtcgaggagcgcatcggcgaggccgctgacgagattggtg

SEQ ID NO: 934 - DNA, 200 bp, Euphorbia heterophylla
atccctaggattgtgagtgaggcttttttcttggcgtcctctggtcgtcctggtccagttttaatcgatgtgcctaaggatatacagcagcaattagctgttcctaattggaatgtatccatgaaattgcctggttatctatctaggttaccgaaagaccctagcgaattgcaattagagcagattgtgaggctaatttc

SEQ ID NO: 935 - DNA, 200 bp, Euphorbia heterophylla
gaaattagcctcacaatctgctctaattgcaattcgctagggtctttcggtaacctagatagataaccaggcaatttcatggatacattccaattaggaacagctaattgctgctgtatatccttaggcacatcgattaaaactggaccaggacgaccagaggacgccaagaaaaaagcctcactcacaatcctagggat

SEQ ID NO: 936 - DNA, 200 bp, Euphorbia heterophylla
tagagcagattgtgaggctaatttccgagtctaagaaaccagttttgtacgttggaggtgggtgtttgaattccagtgaggaattgaggaaatttgttgaattaaccgggattccagttgctagtactttgatgggtttaggatctttcccacttaaccatgacttatccctgtcaatgctcggaatgcatggaactgtt

SEQ ID NO: 937 - DNA, 200 bp, Euphorbia heterophylla
aacagttccatgcattccgagcattgacagggataagtcatggttaagtgggaaagatcctaaacccatcaaagtactagcaactggaatcccggttaattcaacaaatttcctcaattcctcactggaattcaaacacccacctccaacgtacaaaactggtttcttagactcggaaattagcctcacaatctgctcta

SEQ ID NO: 938 - DNA, 200 bp, Euphorbia heterophylla
aatgctcggaatgcatggaactgtttatgccaattatgcagtggacaaaagtgatcttttacttgcatttggagtacgattcgatgatcgtgtgactggaaagctcgaagcttttgcaagccgggctaaaatagttcacatcgacatcgattcggcggaaatcgggaaaaacaagcagccccatgtgtctatatgtggag

SEQ ID NO: 939 - DNA, 200 bp, Euphorbia heterophylla
ctccacatatagacacatggggctgcttgtttttcccgatttccgccgaatcgatgtcgatgtgaactattttagcccggcttgcaaaagcttcgagctttccagtcacacgatcatcgaatcgtactccaaatgcaagtaaaagatcacttttgtccactgcataattggcataaacagttccatgcattccgagcatt

SEQ ID NO: 940 - DNA, 200 bp, Euphorbia heterophylla
cagccccatgtgtctatatgtggagatgttaaattagccttgcagggagtcaacaaaattctggagagcaaaagcttcaagagtaagttagatttcgggaaatggagagacgagttaaatgaccaaaaagttaaatatccattgaatttcaagacttttgatgaagcaattcctcctcagtatgccatacaagttctcga

SEQ ID NO: 941 - DNA, 200 bp, Euphorbia heterophylla
tcgagaacttgtatggcatactgaggaggaattgcttcatcaaaagtcttgaaattcaatggatatttaactttttggtcatttaactcgtctctccatttcccgaaatctaacttactcttgaagcttttgctctccagaattttgttgactccctgcaaggctaatttaacatctccacatatagacacatggggctg

SEQ ID NO: 942 - DNA, 200 bp, Euphorbia heterophylla
ctcagtatgccatacaagttctcgacgaattaaccgatggaaatgccataataagtacaggagtcggacaacatcaaatgtggtcggcccaattttacaagtacaaaaagccgaggcaatggctaacttccggagggttaggtgctatgggtttcggacttccggcagcaataggtgcttcggttgctaaccctaatgcc

SEQ ID NO: 943 - DNA, 200 bp, Euphorbia heterophylla
ggcattagggttagcaaccgaagcacctattgctgccggaagtccgaaacccatagcacctaaccctccggaagttagccattgcctcggctttttgtacttgtaaaattgggccgaccacatttgatgttgtccgactcctgtacttattatggcatttccatcggttaattcgtcgagaacttgtatggcatactgag

SEQ ID NO: 944 - DNA, 200 bp, Euphorbia heterophylla
tgcttcggttgctaaccctaatgccgttgtggttgatatcgatggggatgggagtttcataatgaatgtccaggagttagccacgatccgagtcgaaaatctaccaatcaaaatattgcttctgaataaccagcatttgggtatggttgtacaatgggaagaccgtttttacaaggcgaatcgagctcatacttatttgg

SEQ ID NO: 945 - DNA, 200 bp, Euphorbia heterophylla
ccaaataagtatgagctcgattcgccttgtaaaaacggtcttcccattgtacaaccatacccaaatgctggttattcagaagcaatattttgattggtagattttcgactcggatcgtggctaactcctggacattcattatgaaactcccatccccatcgatatcaaccacaacggcattagggttagcaaccgaagca

SEQ ID NO: 946 - DNA, 200 bp, Euphorbia heterophylla
gcgaatcgagctcatacttatttgggggacccatcgaaagagtcggagattttccccaatatgttgaagtttgctgaagcttgtggaattcctgctgctcgagtgtcgagaaaacaggatataagaggggcaattcagacaatgttggatactcctggtccgtaccttttggatgtgattgtgccacatcaagaacatgt

SEQ ID NO: 947 - DNA, 200 bp, Euphorbia heterophylla
acatgttcttgatgtggcacaatcacatccaaaaggtacggaccaggagtatccaacattgtctgaattgcccctcttatatcctgttttctcgacactcgagcagcaggaattccacaagcttcagcaaacttcaacatattggggaaaatctccgactctttcgatgggtcccccaaataagtatgagctcgattcgc

SEQ ID NO: 948 - DNA, 200 bp, Euphorbia heterophylla
tgattgtgccacatcaagaacatgtgttgcctatgatcccaagtggcggcgggtttaaggatataataacggagggtgatgggagattcaagtactagtcttagtcttgttgaggtaataaaatgtatgttttttgtgtaagttgatgctttggtattaggtgtggttggtcttttggtttatggttatgtgtttaatgt

SEQ ID NO: 949 - DNA, 200 bp, Euphorbia heterophylla
acattaaacacataaccataaaccaaaagaccaaccacacctaataccaaagcatcaacttacacaaaaaacatacattttattacctcaacaagactaagactagtacttgaatctcccatcaccctccgttattatatccttaaacccgccgccacttgggatcataggcaacacatgttcttgatgtggcacaatca

SEQ ID NO: 950 - DNA, 200 bp, Euphorbia heterophylla
cgtcgaggccctggagcgccagggcgtcaccgacgtgttcgcctaccccggcggcgcctcaatggagatccaccaagccctaacccgctccccaaccatccgcaacgtcctcccccgccacgagcagggcggcgtcttcgccgctgaaggatacgcccgcgcctccggcaagcccggcgtgtgcatcgcgacctccggcc

SEQ ID NO: 951 - DNA, 200 bp, Euphorbia heterophylla
ggccggaggtcgcgatgcacacgccgggcttgccggaggcgcgggcgtatccttcagcggcgaagacgccgccctgctcgtggcgggggaggacgttgcggatggttggggagcgggttagggcttggtggatctccattgaggcgccgccggggtaggcgaacacgtcggtgacgccctggcgctccagggcctcgacg

SEQ ID NO: 952 - DNA, 200 bp, Euphorbia heterophylla
ggcgtgtgcatcgcgacctccggcccaggcgccaccaatctcgtcagcggcctcgccgatgcgctcctcgacagcgtccccattgtggccatcaccggccaggtgcctcgccggatgatcggaaccgacgccttccaggaaactccgattgttgaggtaactcgatccataacgaagcacaattatttggtacttgatat

SEQ ID NO: 953 - DNA, 200 bp, Euphorbia heterophylla
atatcaagtaccaaataattgtgcttcgttatggatcgagttacctcaacaatcggagtttcctggaaggcgtcggttccgatcatccggcgaggcacctggccggtgatggccacaatggggacgctgtcgaggagcgcatcggcgaggccgctgacgagattggtggcgcctgggccggaggtcgcgatgcacacgcc

SEQ ID NO: 954 - DNA, 200 bp, Euphorbia heterophylla
agcacaattatttggtacttgatattgaggatatccctaggattgtgagtgaggcttttttcttggcgtcctctggtcgtcctggtccagttttaatcgatgtgcctaaggatatacagcagcaattagctgttcctaattggaatgtatccatgaaattgcctggttatctatctaggttaccgaaagaccctagcgaa

SEQ ID NO: 955 - DNA, 200 bp, Euphorbia heterophylla
ttcgctagggtctttcggtaacctagatagataaccaggcaatttcatggatacattccaattaggaacagctaattgctgctgtatatccttaggcacatcgattaaaactggaccaggacgaccagaggacgccaagaaaaaagcctcactcacaatcctagggatatcctcaatatcaagtaccaaataattgtgct

SEQ ID NO: 956 - DNA, 200 bp, Euphorbia heterophylla
taggttaccgaaagaccctagcgaattgcaattagagcagattgtgaggctaatttccgagtctaagaaaccagttttgtacgttggaggtgggtgtttgaattccagtgaggaattgaggaaatttgttgaattaaccgggattccagttgctagtactttgatgggtttaggatctttcccacttaaccatgacttat

SEQ ID NO: 957 - DNA, 200 bp, Euphorbia heterophylla
ataagtcatggttaagtgggaaagatcctaaacccatcaaagtactagcaactggaatcccggttaattcaacaaatttcctcaattcctcactggaattcaaacacccacctccaacgtacaaaactggtttcttagactcggaaattagcctcacaatctgctctaattgcaattcgctagggtctttcggtaaccta

SEQ ID NO: 958 - DNA, 200 bp, Euphorbia heterophylla
tctttcccacttaaccatgacttatccctgtcaatgctcggaatgcatggaactgtttatgccaattatgcagtggacaaaagtgatcttttacttgcatttggagtacgattcgatgatcgtgtgactggaaagctcgaagcttttgcaagccgggctaaaatagttcacatcgacatcgattcggcggaaatcgggaa

SEQ ID NO: 959 - DNA, 200 bp, Euphorbia heterophylla
ttcccgatttccgccgaatcgatgtcgatgtgaactattttagcccggcttgcaaaagcttcgagctttccagtcacacgatcatcgaatcgtactccaaatgcaagtaaaagatcacttttgtccactgcataattggcataaacagttccatgcattccgagcattgacagggataagtcatggttaagtgggaaaga

SEQ ID NO: 960 - DNA, 200 bp, Euphorbia heterophylla
acatcgattcggcggaaatcgggaaaaacaagcagccccatgtgtctatatgtggagatgttaaattagccttgcagggagtcaacaaaattctggagagcaaaagcttcaagagtaagttagatttcgggaaatggagagacgagttaaatgaccaaaaagttaaatatccattgaatttcaagacttttgatgaagca

SEQ ID NO: 961 - DNA, 200 bp, Euphorbia heterophylla
tgcttcatcaaaagtcttgaaattcaatggatatttaactttttggtcatttaactcgtctctccatttcccgaaatctaacttactcttgaagcttttgctctccagaattttgttgactccctgcaaggctaatttaacatctccacatatagacacatggggctgcttgtttttcccgatttccgccgaatcgatgt

SEQ ID NO: 962 - DNA, 200 bp, Euphorbia heterophylla
gaatttcaagacttttgatgaagcaattcctcctcagtatgccatacaagttctcgacgaattaaccgatggaaatgccataataagtacaggagtcggacaacatcaaatgtggtcggcccaattttacaagtacaaaaagccgaggcaatggctaacttccggagggttaggtgctatgggtttcggacttccggcag

SEQ ID NO: 963 - DNA, 200 bp, Euphorbia heterophylla
ctgccggaagtccgaaacccatagcacctaaccctccggaagttagccattgcctcggctttttgtacttgtaaaattgggccgaccacatttgatgttgtccgactcctgtacttattatggcatttccatcggttaattcgtcgagaacttgtatggcatactgaggaggaattgcttcatcaaaagtcttgaaattc

SEQ ID NO: 964 - DNA, 200 bp, Euphorbia heterophylla
gctatgggtttcggacttccggcagcaataggtgcttcggttgctaaccctaatgccgttgtggttgatatcgatggggatgggagtttcataatgaatgtccaggagttagccacgatccgagtcgaaaatctaccaatcaaaatattgcttctgaataaccagcatttgggtatggttgtacaatgggaagaccgttt

SEQ ID NO: 965 - DNA, 200 bp, Euphorbia heterophylla
aaacggtcttcccattgtacaaccatacccaaatgctggttattcagaagcaatattttgattggtagattttcgactcggatcgtggctaactcctggacattcattatgaaactcccatccccatcgatatcaaccacaacggcattagggttagcaaccgaagcacctattgctgccggaagtccgaaacccatagc

SEQ ID NO: 966 - DNA, 200 bp, Euphorbia heterophylla
tggttgtacaatgggaagaccgtttttacaaggcgaatcgagctcatacttatttgggggacccatcgaaagagtcggagattttccccaatatgttgaagtttgctgaagcttgtggaattcctgctgctcgagtgtcgagaaaacaggatataagaggggcaattcagacaatgttggatactcctggtccgtacctt

SEQ ID NO: 967 - DNA, 200 bp, Euphorbia heterophylla
aaggtacggaccaggagtatccaacattgtctgaattgcccctcttatatcctgttttctcgacactcgagcagcaggaattccacaagcttcagcaaacttcaacatattggggaaaatctccgactctttcgatgggtcccccaaataagtatgagctcgattcgccttgtaaaaacggtcttcccattgtacaacca

SEQ ID NO: 968 - DNA, 200 bp, Euphorbia heterophylla
gttggatactcctggtccgtaccttttggatgtgattgtgccacatcaagaacatgtgttgcctatgatcccaagtggcggcgggtttaaggatataataactgagggtgatgggagattcaagtactagtcttagtcttgttgaggtaataaaatgtatgttttttgtgtaagttgatgctttggtattaggtgtggtt

SEQ ID NO: 969 - DNA, 200 bp, Euphorbia heterophylla
aaccacacctaataccaaagcatcaacttacacaaaaaacatacattttattacctcaacaagactaagactagtacttgaatctcccatcaccctcagttattatatccttaaacccgccgccacttgggatcataggcaacacatgttcttgatgtggcacaatcacatccaaaaggtacggaccaggagtatccaac

SEQ ID NO: 970 - DNA, 200 bp, Euphorbia heterophylla
tgatgctttggtattaggtgtggttggtcttttggtttatggttatgtgtttaatgttgttgttggtttgtgtttggacttgaaacgtgttgcatttgctatgttcttgttagcttggcaaatgattaaagttatctgtaattgttcttgtacttttaggtaataatatgcttcctagaagaggttttgctcttgttttc

SEQ ID NO: 971 - DNA, 200 bp, Euphorbia heterophylla
gaaaacaagagcaaaacctcttctaggaagcatattattacctaaaagtacaagaacaattacagataactttaatcatttgccaagctaacaagaacatagcaaatgcaacacgtttcaagtccaaacacaaaccaacaacaacattaaacacataaccataaaccaaaagaccaaccacacctaataccaaagcatca

SEQ ID NO: 972 - DNA, 200 bp, Euphorbia heterophylla
tagaagaggttttgctcttgttttctttcactaattttttgttagtgaagtagaaaattctccaaagagggcaaagtataagaaaaaaaccaatatataatattgtagatctatagttgattatagatgaaacaagttatcctaaacttctaggagctaaatagaacttattggagcgggactaaactaaatatattaga

SEQ ID NO: 973 - DNA, 200 bp, Euphorbia heterophylla
tctaatatatttagtttagtcccgctccaataagttctatttagctcctagaagtttaggataacttgtttcatctataatcaactatagatctacaatattatatattggtttttttcttatactttgccctctttggagaattttctacttcactaacaaaaaattagtgaaagaaaacaagagcaaaacctcttcta

SEQ ID NO: 974 - DNA, 200 bp, Euphorbia heterophylla
gcgggactaaactaaatatattagatatgaattgaattgaattgaaatgacgaaatttaagaatagaattccaagaggatgaggccaaaacaaaagattgtagtaattgagtccatgaaaaaagatttgatttcaaaagggcctcatagtaaaataattgttcataatagcaattagtcaattattcatcagtgggttcg

SEQ ID NO: 975 - DNA, 200 bp, Euphorbia heterophylla
cgaacccactgatgaataattgactaattgctattatgaacaattattttactatgaggcccttttgaaatcaaatcttttttcatggactcaattactacaatcttttgttttggcctcatcctcttggaattctattcttaaatttcgtcatttcaattcaattcaattcatatctaatatatttagtttagtcccgc

SEQ ID NO: 976 - DNA, 200 bp, Euphorbia heterophylla
agtcaattattcatcagtgggttcgtttaagattcttaatcttaatttctcaaatgaaatcctagaaagtttccaactttactaggaaaagagcaatattattgactaaaaatgaattaaatgtttggtccacaaaagtttggaattttcatgtttttgccagattgccatcaagtggaaaacatgtctgcagttggata

SEQ ID NO: 977 - DNA, 200 bp, Euphorbia heterophylla
tatccaactgcagacatgttttccacttgatggcaatctggcaaaaacatgaaaattccaaacttttgtggaccaaacatttaattcatttttagtcaataatattgctcttttcctagtaaagttggaaactttctaggatttcatttgagaaattaagattaagaatcttaaacgaacccactgatgaataattgact

SEQ ID NO: 978 - DNA, 200 bp, Euphorbia heterophylla
tggaaaacatgtctgcagttggataagaaatggaaaatctatgtgaagttgttgtgcaaaggaaggccatacaattattttggcagataatgtaaagccaaaatacaatatgcactgcttttaaaagtttatgtgcaacagtttgaatagttagttcagacttttagcagtattataaatggttaggtcatattttcgga

SEQ ID NO: 979 - DNA, 200 bp, Euphorbia heterophylla
tccgaaaatatgacctaaccatttataatactgctaaaagtctgaactaactattcaaactgttgcacataaacttttaaaagcagtgcatattgtattttggctttacattatctgccaaaataattgtatggccttcctttgcacaacaacttcacatagattttccatttcttatccaactgcagacatgttttcca

SEQ ID NO: 980 - DNA, 200 bp, Euphorbia heterophylla
taaatggttaggtcatattttcggagactacaattcagtttagttgggagtacaattcagttcagttgtgtgtagttatcaatttacattcaaatatggccctgtttagttcaggtcattttagttcatctcaactaactttaatttaatttactttagctttaaaaaatttaaaataacatgacctttggtatataatt

SEQ ID NO: 981 - DNA, 200 bp, Euphorbia heterophylla
aattatataccaaaggtcatgttattttaaattttttaaagctaaagtaaattaaattaaagttagttgagatgaactaaaatgacctgaactaaacagggccatatttgaatgtaaattgataactacacacaactgaactgaattgtactcccaactaaactgaattgtagtctccgaaaatatgacctaaccattta

SEQ ID NO: 982 - DNA, 200 bp, Euphorbia heterophylla
ataacatgacctttggtatataattgtaacttctactcaaaaaaacaacaaaagagttttctatatcaatgtaatttcatcaacatcggaagttttttatgggataggtagcacaaaaatgaaaactaaaacgaaattgggaaaaccattttcaaaaagtataagtttggaaatgtgtaaataataaaaaatatatatgg

SEQ ID NO: 983 - DNA, 200 bp, Euphorbia heterophylla
ccatatatattttttattatttacacatttccaaacttatactttttgaaaatggttttcccaatttcgttttagttttcatttttgtgctacctatcccataaaaaacttccgatgttgatgaaattacattgatatagaaaactcttttgttgtttttttgagtagaagttacaattatataccaaaggtcatgttat

SEQ ID NO: 984 - DNA, 200 bp, Euphorbia heterophylla
tgtaaataataaaaaatatatatggatatatttataaatataaaattttttaagcatataatttcattttttgtataaaatattaaagtattatttaaaatatattcattactctctccggttccaaataaaagaccttttggccttttttatttggttctaaatatttgatcatttagattatccatgcaatatttatt

SEQ ID NO: 985 - DNA, 200 bp, Euphorbia heterophylla
aataaatattgcatggataatctaaatgatcaaatatttagaaccaaataaaaaaggccaaaaggtcttttatttggaaccggagagagtaatgaatatattttaaataatactttaatattttatacaaaaaatgaaattatatgcttaaaaaattttatatttataaatatatccatatatattttttattatttaca

SEQ ID NO: 986 - DNA, 200 bp, Euphorbia heterophylla
ttcagtttagttcaattcagcaagttgcagttcaaaagaacagagccttaatgtccaatattgaattgtttgaaatgtactattaccatatgttttaaaaagtgttgtcagtcagatagtcgagacttcgaaataattacaatggacttggacggaatctagatgggagttaaataaatttatattttttaaatattatt

SEQ ID NO: 987 - DNA, 200 bp, Euphorbia heterophylla
aataatatttaaaaaatataaatttatttaactcccatctagattccgtccaagtccattgtaattatttcgaagtctcgactatctgactgacaacactttttaaaacatatggtaatagtacatttcaaacaattcaatattggacattaaggctctgttcttttgaactgcaacttgctgaattgaactaaactgaa

SEQ ID NO: 988 - DNA, 200 bp, Euphorbia heterophylla
aaatttatattttttaaatattatttaatatataaaaaatataaatttaattaaaaataaattataataaaataaaaaaaataatttaaatttttaaaataacattctaaaaagtccactaaacgatattataaaaatttcgacttaaatacctttttgggttctgttctatacaccaaatgcccttttggtgtctgacc

SEQ ID NO: 989 - DNA, 200 bp, Euphorbia heterophylla
ggtcagacaccaaaagggcatttggtgtatagaacagaacccaaaaaggtatttaagtcgaaatttttataatatcgtttagtggactttttagaatgttattttaaaaatttaaattattttttttattttattataatttatttttaattaaatttatattttttatatattaaataatatttaaaaaatataaattt

SEQ ID NO: 990 - DNA, 200 bp, Euphorbia heterophylla
ccaaatgcccttttggtgtctgacctattgagatcgcctttttttatgtctgacgtattcaatatttgcttatttggtacatttcatattcaatttcagtatgataacttaatcgactaaaaagagtcaacaatttatgcatgatcaacaaaatatattcatgtgttcaaaccatattatatgcatttcatattctttgt

SEQ ID NO: 991 - DNA, 200 bp, Euphorbia heterophylla
acaaagaatatgaaatgcatataatatggtttgaacacatgaatatattttgttgatcatgcataaattgttgactctttttagtcgattaagttatcatactgaaattgaatatgaaatgtaccaaataagcaaatattgaatacgtcagacataaaaaaaggcgatctcaataggtcagacaccaaaagggcatttgg

SEQ ID NO: 992 - DNA, 200 bp, Euphorbia heterophylla
attatatgcatttcatattctttgtgttgttagatggatgctcgatgtactaaaataatatagatcaaacactaaataggctaatgttgaatacatcaggcaccaactaggcaaaaagtgaatacatcacgcaccaaacagacaatttcaataggtcaaacaccaaaaaagtatttaatatataaaacaggacctaaaaa

SEQ ID NO: 993 - DNA, 200 bp, Euphorbia heterophylla
tttttaggtcctgttttatatattaaatacttttttggtgtttgacctattgaaattgtctgtttggtgcgtgatgtattcactttttgcctagttggtgcctgatgtattcaacattagcctatttagtgtttgatctatattattttagtacatcgagcatccatctaacaacacaaagaatatgaaatgcatataat

SEQ ID NO: 994 - DNA, 200 bp, Euphorbia heterophylla
taatatataaaacaggacctaaaaaaatattcaattatacaaaatttcctactatttaagatcacaacaacattctaaaaaattctacgtaaccgcgagctagctcgagttataaaacactttgtgtttagtaaatagtgaaggtcataaaggtaatttggggtggaccttcaaattttaaaagggaatcgagggccaca

SEQ ID NO: 995 - DNA, 200 bp, Euphorbia heterophylla
tgtggccctcgattcccttttaaaatttgaaggtccaccccaaattacctttatgaccttcactatttactaaacacaaagtgttttataactcgagctagctcgcggttacgtagaattttttagaatgttgttgtgatcttaaatagtaggaaattttgtataattgaatatttttttaggtcctgttttatatatta

SEQ ID NO: 996 - DNA, 200 bp, Euphorbia heterophylla
ttttaaaagggaatcgagggccacatatcacactccctcttccgccacaaaacctgcaactctctccttctactctccacaatggcggcggcggcgccttcctctgcagccaccaccatctccaaaccctccgccgtcagatcctcaatctccgcctcccgattctccctcccgttccccatcaaaccccaatccaccac

SEQ ID NO: 997 - DNA, 200 bp, Euphorbia heterophylla
gtggtggattggggtttgatggggaacgggagggagaatcgggaggcggagattgaggatctgacggcggagggtttggagatggtggtggctgcagaggaaggcgccgccgccgccattgtggagagtagaaggagagagttgcaggttttgtggcggaagagggagtgtgatatgtggccctcgattcccttttaaaa

SEQ ID NO: 998 - DNA, 200 bp, Euphorbia heterophylla
tccccatcaaaccccaatccaccaccccccgccgctctctccaaatctccaactccactcccaaacccacaatccccgctccctccgtcccctccgccccccaaacccctcccccgcggttcgcccccgacgagccccgcaagggcgccgacattctcgtcgaggccctggagcgccagggcgtcaccgacgtgttcgcc

SEQ ID NO: 999 - DNA, 200 bp, Euphorbia heterophylla
ggcgaacacgtcggtgacgccctggcgctccagggcctcgacgagaatgtcggcgcccttgcggggctcgtcgggggcgaaccgcgggggaggggtttggggggcggaggggacggagggagcggggattgtgggtttgggagtggagttggagatttggagagagcggcggggggtggtggattggggtttgatgggga

SEQ ID NO: 1000 - DNA, 200 bp, Euphorbia heterophylla
ccagggcgtcaccgacgtgttcgcctaccccggcggcgcctcaatggagatccaccaagccctaacccgctccccaaccatccgcaacgtcctcccccgccacgagcagggcggcgtcttcgccgctgaaggatacgcccgcgcctccggcaagcccggcgtgtgcatcgcgacctccggcccaggcgccaccaatctcg

SEQ ID NO: 1001 - DNA, 200 bp, Euphorbia heterophylla
cgagattggtggcgcctgggccggaggtcgcgatgcacacgccgggcttgccggaggcgcgggcgtatccttcagcggcgaagacgccgccctgctcgtggcgggggaggacgttgcggatggttggggagcgggttagggcttggtggatctccattgaggcgccgccggggtaggcgaacacgtcggtgacgccctgg

SEQ ID NO: 1002 - DNA, 200 bp, Euphorbia heterophylla
tccggcccaggcgccaccaatctcgtcagcggcctcgccgatgcgctcctcgacagcgtccccattgtggccatcaccggccaggtgcctcgccggatgatcggaaccgacgccttccaggaaactccgattgttgaggtaactcgatccataacgaagcacaattatttggtacttgatattgaggatatccctaggat

SEQ ID NO: 1003 - DNA, 200 bp, Euphorbia heterophylla
atcctagggatatcctcaatatcaagtaccaaataattgtgcttcgttatggatcgagttacctcaacaatcggagtttcctggaaggcgtcggttccgatcatccggcgaggcacctggccggtgatggccacaatggggacgctgtcgaggagcgcatcggcgaggccgctgacgagattggtggcgcctgggccgga

SEQ ID NO: 1004 - DNA, 200 bp, Euphorbia heterophylla
ttgatattgaggatatccctaggattgtgagtgaggcttttttcttggcgtcctctggtcgtcctggtccagttttaatcgatgtgcctaaggatatacagcagcaattagctgttcctaattggaatgtatccatgaaattgcctggttatctatctaggttaccgaaagaccctagcgaattgcaattagagcagatt

SEQ ID NO: 1005 - DNA, 200 bp, Euphorbia heterophylla
aatctgctctaattgcaattcgctagggtctttcggtaacctagatagataaccaggcaatttcatggatacattccaattaggaacagctaattgctgctgtatatccttaggcacatcgattaaaactggaccaggacgaccagaggacgccaagaaaaaagcctcactcacaatcctagggatatcctcaatatcaa

SEQ ID NO: 1006 - DNA, 200 bp, Euphorbia heterophylla
tagcgaattgcaattagagcagattgtgaggctaatttccgagtctaagaaaccagttttgtacgttggaggtgggtgtttgaattccagtgaggaattgaggaaatttgttgaattaaccgggattccagtagctagtactttgatgggtttaggatcttttccacttaaccatgacttatccctgtcaatgctcggaa

SEQ ID NO: 1007 - DNA, 200 bp, Euphorbia heterophylla
ttccgagcattgacagggataagtcatggttaagtggaaaagatcctaaacccatcaaagtactagctactggaatcccggttaattcaacaaatttcctcaattcctcactggaattcaaacacccacctccaacgtacaaaactggtttcttagactcggaaattagcctcacaatctgctctaattgcaattcgcta

SEQ ID NO: 1008 - DNA, 200 bp, Euphorbia heterophylla
gacttatccctgtcaatgctcggaatgcatggaactgtttatgccaattatgcagtggacaaaagtgatcttttacttgcatttggagtacgattcgatgatcgtgtgactggaaagctcgaagcttttgcaagccgggctaaaatagttcacatcgacatcgattcggcggaaatcgggaaaaacaagcagccccatgt

SEQ ID NO: 1009 - DNA, 200 bp, Euphorbia heterophylla
acatggggctgcttgtttttcccgatttccgccgaatcgatgtcgatgtgaactattttagcccggcttgcaaaagcttcgagctttccagtcacacgatcatcgaatcgtactccaaatgcaagtaaaagatcacttttgtccactgcataattggcataaacagttccatgcattccgagcattgacagggataagtc

SEQ ID NO: 1010 - DNA, 200 bp, Euphorbia heterophylla
tcgggaaaaacaagcagccccatgtgtctatatgtggagatgttaaattagccttgcagggagtcaacaaaattctggagagcaaaagcttcaagagtaagttagatttcgggaaatggagggacgagttaaatgaccaaaaagttaaatatccattgaatttcaagacttttgatgaagcaattcctcctcagtatgcc

SEQ ID NO: 1011 - DNA, 200 bp, Euphorbia heterophylla
ggcatactgaggaggaattgcttcatcaaaagtcttgaaattcaatggatatttaactttttggtcatttaactcgtccctccatttcccgaaatctaacttactcttgaagcttttgctctccagaattttgttgactccctgcaaggctaatttaacatctccacatatagacacatggggctgcttgtttttcccga

SEQ ID NO: 1012 - DNA, 200 bp, Euphorbia heterophylla
tgaagcaattcctcctcagtatgccatacaagttctcgacgaattaaccgatggaaatgcgataataagtacaggagtcggacaacatcaaatgtggtcggcccaattttacaagtacaaaaagccgaggcaatggctaacttccggagggttaggtgctatgggtttcggacttccggcagcaataggtgcttcggttg

SEQ ID NO: 1013 - DNA, 200 bp, Euphorbia heterophylla
caaccgaagcacctattgctgccggaagtccgaaacccatagcacctaaccctccggaagttagccattgcctcggctttttgtacttgtaaaattgggccgaccacatttgatgttgtccgactcctgtacttattatcgcatttccatcggttaattcgtcgagaacttgtatggcatactgaggaggaattgcttca

SEQ ID NO: 1014 - DNA, 200 bp, Euphorbia heterophylla
ccggcagcaataggtgcttcggttgctaaccctaatgccgttgtggttgatatcgatggggatgggagtttcataatgaatgtccaggagttagccacgattcgagtggaaaatctaccgatcaaaatattgcttctgaataaccagcatttgggtatggttgtacaatgggaagaccgattttacaaggcgaatcgagc

SEQ ID NO: 1015 - DNA, 200 bp, Euphorbia heterophylla
gctcgattcgccttgtaaaatcggtcttcccattgtacaaccatacccaaatgctggttattcagaagcaatattttgatcggtagattttccactcgaatcgtggctaactcctggacattcattatgaaactcccatccccatcgatatcaaccacaacggcattagggttagcaaccgaagcacctattgctgccgg

SEQ ID NO: 1016 - DNA, 200 bp, Euphorbia heterophylla
accgattttacaaggcgaatcgagctcatacttatttgggggacccatcgaaagagtcggagattttccccaatatgttgaagtttgctgaagcttgtggaattcctgctgctcgagtgtcgagaaaacaggatataagaggggcaattcagacaatgttggatactcctggtccgtaccttttggatgtgattgtgcca

SEQ ID NO: 1017 - DNA, 200 bp, Euphorbia heterophylla
tggcacaatcacatccaaaaggtacggaccaggagtatccaacattgtctgaattgcccctcttatatcctgttttctcgacactcgagcagcaggaattccacaagcttcagcaaacttcaacatattggggaaaatctccgactctttcgatgggtcccccaaataagtatgagctcgattcgccttgtaaaatcggt

SEQ ID NO: 1018 - DNA, 200 bp, Euphorbia heterophylla
gtaccttttggatgtgattgtgccacatcaagaacatgtgttgcctatgatcccaagtggcggcgggtttaaggatataataaccgagggtgatgggagattcaagtactagtcttagtcttgttgaggtaataaaatgtatgttttttgtgtaagttgatgctttggtattaggtgtggttggtcttttggttaatggt

SEQ ID NO: 1019 - DNA, 200 bp, Euphorbia heterophylla
accattaaccaaaagaccaaccacacctaataccaaagcatcaacttacacaaaaaacatacattttattacctcaacaagactaagactagtacttgaatctcccatcaccctcggttattatatccttaaacccgccgccacttgggatcataggcaacacatgttcttgatgtggcacaatcacatccaaaaggtac

SEQ ID NO: 1020 - DNA, 200 bp, Euphorbia heterophylla
tgtggttggtcttttggttaatggttatgtgtttaatgttgttgttggtttgtgtttggacttgaaacgtgttgcatttgctatgttcttgttagcttggcaaatgattaaagttatctgtaattgttcttgtacttttaggtaataatatgcttcctagatgaggttttgaagaggttttgctcttgttttctttcact

SEQ ID NO: 1021 - DNA, 200 bp, Euphorbia heterophylla
agtgaaagaaaacaagagcaaaacctcttcaaaacctcatctaggaagcatattattacctaaaagtacaagaacaattacagataactttaatcatttgccaagctaacaagaacatagcaaatgcaacacgtttcaagtccaaacacaaaccaacaacaacattaaacacataaccattaaccaaaagaccaaccaca

SEQ ID NO: 1022 - DNA, 200 bp, Euphorbia heterophylla
ggttttgctcttgttttctttcactaattttttgttagtgaagtagaaaattctccaaagagggcaaagtataagaaaaaaaccaatatataatattgtagatctatagttgattatagatgaaataagttatcctaaacttctaggagctaaatagaacttattggagcaggactaaactaaatatatgagatatgaat

SEQ ID NO: 1023 - DNA, 200 bp, Euphorbia heterophylla
attcatatctcatatatttagtttagtcctgctccaataagttctatttagctcctagaagtttaggataacttatttcatctataatcaactatagatctacaatattatatattggtttttttcttatactttgccctctttggagaattttctacttcactaacaaaaaattagtgaaagaaaacaagagcaaaacc

SEQ ID NO: 1024 - DNA, 200 bp, Euphorbia heterophylla
taaactaaatatatgagatatgaattgaactgactgaaatttaagaatagaattccaagaggacaagaccaaaacagaagattgtagtaattgagtccatgaaaaaagatttgatttcaaaagggcctcatcgtaaaataattgttcataatagcaattagtcaattattcatcagtgggttcgtttaagattcttaatc

SEQ ID NO: 1025 - DNA, 200 bp, Euphorbia heterophylla
gattaagaatcttaaacgaacccactgatgaataattgactaattgctattatgaacaattattttacgatgaggcccttttgaaatcaaatcttttttcatggactcaattactacaatcttctgttttggtcttgtcctcttggaattctattcttaaatttcagtcagttcaattcatatctcatatatttagttta

SEQ ID NO: 1026 - DNA, 200 bp, Euphorbia heterophylla
gtgggttcgtttaagattcttaatcttaatttctcaaatgaaatcctagaaagtttccaactttactaggaaaagagcaatattattgactaaaaatgaattaaatgtttggtccacaaaagtttggaattttcatgtttttgccagattgccatcaagtggaaaacatgtctgcagttggataagaaatggaaaatcta

SEQ ID NO: 1027 - DNA, 200 bp, Euphorbia heterophylla
tagattttccatttcttatccaactgcagacatgttttccacttgatggcaatctggcaaaaacatgaaaattccaaacttttgtggaccaaacatttaattcatttttagtcaataatattgctcttttcctagtaaagttggaaactttctaggatttcatttgagaaattaagattaagaatcttaaacgaacccac

SEQ ID NO: 1028 - DNA, 200 bp, Euphorbia heterophylla
agttggataagaaatggaaaatctatgtgaagttgtgcaaaggaaggccatacaattattttggcagataatgtaaagccaaaatacaatatgcactgcttttaaaagtttatgtgcaacagtttgaatagttagttcagacttttagcagtattataaatggttaggtcatattttcggagactacaattcagctcagt

SEQ ID NO: 1029 - DNA, 200 bp, Euphorbia heterophylla
actgagctgaattgtagtctccgaaaatatgacctaaccatttataatactgctaaaagtctgaactaactattcaaactgttgcacataaacttttaaaagcagtgcatattgtattttggctttacattatctgccaaaataattgtatggccttcctttgcacaacttcacatagattttccatttcttatccaact

SEQ ID NO: 1030 - DNA, 200 bp, Euphorbia heterophylla
ttcggagactacaattcagctcagtttggagtaaaattcaattcagttgtatgtatttatcgatttacattcaaataaggccttgtttagtttgggtcatattaatttagttcaaccaactttaattttatttactttagttttaaaaaatataaaataacatgacttttgttatacaaatgtaacttcaactcaaaaac

SEQ ID NO: 1031 - DNA, 200 bp, Euphorbia heterophylla
gtttttgagttgaagttacatttgtataacaaaagtcatgttattttatattttttaaaactaaagtaaataaaattaaagttggttgaactaaattaatatgacccaaactaaacaaggccttatttgaatgtaaatcgataaatacatacaactgaattgaattttactccaaactgagctgaattgtagtctccgaa

SEQ ID NO: 1032 - DNA, 200 bp, Euphorbia heterophylla
acaaatgtaacttcaactcaaaaacacaacaaaagagttttctatatcaatgtaattttggggtatttatcttggcttaaaaagtttcttataataactttttaacttataaaaagtaaaagaagtgtttctttcagctgatttttaatttaaaagtaaaaatatagaagtaaggatttgttacttttctacttttgctt

SEQ ID NO: 1033 - DNA, 200 bp, Euphorbia heterophylla
aagcaaaagtagaaaagtaacaaatccttacttctatatttttacttttaaattaaaaatcagctgaaagaaacacttcttttactttttataagttaaaaagttattataagaaactttttaagccaagataaataccccaaaattacattgatatagaaaactcttttgttgtgtttttgagttgaagttacatttgt

SEQ ID NO: 1034 - DNA, 200 bp, Euphorbia heterophylla
atttgttacttttctacttttgcttttctttaagacaaaagctataagctaagagaaacacccctttatcaacattggaagttgtttacgggctaggtagcacaaaattggaaactgaaacggaaatgagaaaacccattttcaaaacgtataggtttggataccgtaaggaaacgtgtaaataataaaaaatgtatgga

SEQ ID NO: 1035 - DNA, 200 bp, Euphorbia heterophylla
tccatacattttttattatttacacgtttccttacggtatccaaacctatacgttttgaaaatgggttttctcatttccgtttcagtttccaattttgtgctacctagcccgtaaacaacttccaatgttgataaaggggtgtttctcttagcttatagcttttgtcttaaagaaaagcaaaagtagaaaagtaacaaat

SEQ ID NO: 1036 - DNA, 200 bp, Euphorbia heterophylla
gtgtaaataataaaaaatgtatggatatatttataaatataaaattttttatgcatataatttcattttttcataaaatattaaaatattatttaaaatatattcattaattactaaagacatctccaaccctcgctatctctttttcccctaaaactttttactctccaactctaccttttaaatttttagttcaaaac

SEQ ID NO: 1037 - DNA, 200 bp, Euphorbia heterophylla
gttttgaactaaaaatttaaaaggtagagttggagagtaaaaagttttaggggaaaaagagatagcgagggttggagatgtctttagtaattaatgaatatattttaaataatattttaatattttatgaaaaaatgaaattatatgcataaaaaattttatatttataaatatatccatacattttttattatttacac

SEQ ID NO: 1038 - DNA, 200 bp, Euphorbia heterophylla
accttttaaatttttagttcaaaacacatatattattgatttattcttacatatctaactttttattatcattttattcctcctttcctatctaactcaaacaagcataaactcaattaaataataaataaaagaaaaggcaaaaaaaattaagggatgaacaatgctgttttagagcaacatcctctcaaatttgaggc

SEQ ID NO: 1039 - DNA, 200 bp, Euphorbia heterophylla
gcctcaaatttgagaggatgttgctctaaaacagcattgttcatcccttaattttttttgccttttcttttatttattatttaattgagtttatgcttgtttgagttagataggaaaggaggaataaaatgataataaaaagttagatatgtaagaataaatcaataatatatgtgttttgaactaaaaatttaaaaggt

SEQ ID NO: 1040 - DNA, 200 bp, Kochia scoparia
aaaatggagaacaaatattaaccacgaaatgagtagtagaaaaaaggaaacaccttttttatttgcattattattattactttatgtaggaaaactccatttggagtcttgacaaaaacaaatgaatgaaaaaagactttttggttttggtaatttaagctaaaaagaaaaagaaaaagaaaaaggagaaaaccagagtt

SEQ ID NO: 1041 - DNA, 200 bp, Kochia scoparia
aactctggttttctcctttttctttttctttttctttttagcttaaattaccaaaaccaaaaagtcttttttcattcatttgtttttgtcaagactccaaatggagttttcctacataaagtaataataataatgcaaataaaaaaggtgtttccttttttctactactcatttcgtggttaatatttgttctccatttt

SEQ ID NO: 1042 - DNA, 200 bp, Kochia scoparia
aaagaaaaaggagaaaaccagagttgagcgcctccactagttgttttcctttccttcctcggaagaaccctatttcttcctccctcatatgatatccttccttcaaactccacactcctctctttcattttctctctgatcataccttcaaccttcaacaatggcgtctacttctgcaaatcccacttttacccctttca

SEQ ID NO: 1043 - DNA, 200 bp, Kochia scoparia
tgaaaggggtaaaagtgggatttgcagaagtagacgccattgttgaaggttgaaggtatgatcagagagaaaatgaaagagaggagtgtggagtttgaaggaaggatatcatatgagggaggaagaaatagggttcttccgaggaaggaaaggaaaacaactagtggaggcgctcaactctggttttctcctttttcttt

SEQ ID NO: 1044 - DNA, 200 bp, Kochia scoparia
gcaaatcccacttttacccctttcaccagtaaaccccttaaaccccgttctccctttcactctttcccatttccctcaaaccccaaaaccccttcctcttcatttcgcaacctcaaaatcacatcttctctctcttcttcacaacccccgaaaccaccttccgccgtcaaaatccactcaccaccttcccctctcacaac

SEQ ID NO: 1045 - DNA, 200 bp, Kochia scoparia
gttgtgagaggggaaggtggtgagtggattttgacggcggaaggtggtttcgggggttgtgaagaagagagagaagatgtgattttgaggttgcgaaatgaagaggaaggggttttggggtttgagggaaatgggaaagagtgaaagggagaacggggtttaaggggtttactggtgaaaggggtaaaagtgggatttgc

SEQ ID NO: 1046 - DNA, 200 bp, Kochia scoparia
actcaccaccttcccctctcacaaccgacgaacccccgcaaggttttgtttcccgatttgcccctgaccaacccagaaaaggctgcgatgtcctcgttgaggccctcgagcgggagggcgtcaccgacgtgttcgcttatcctggtggcgcatcaatggagattcatcaagctctgactcgctctgattccatacgcaac

SEQ ID NO: 1047 - DNA, 200 bp, Kochia scoparia
gttgcgtatggaatcagagcgagtcagagcttgatgaatctccattgatgcgccaccaggataagcgaacacgtcggtgacgccctcccgctcgagggcctcaacgaggacatcgcagccttttctgggttggtcaggggcaaatcgggaaacaaaaccttgcgggggttcgtcggttgtgagaggggaaggtggtgagt

SEQ ID NO: 1048 - DNA, 200 bp, Kochia scoparia
gactcgctctgattccatacgcaacgtcctgcctcgccacgagcaaggcgggatctttgccgcggaggggtatgctcgtgccacgggccgtgttggtgtctgcattgcgacatctggccctggcgctacgaacctcgtgtccgggtttgctgatgctttgctcgattccgttccactggtggcgatcacggggcaggtgc

SEQ ID NO: 1049 - DNA, 200 bp, Kochia scoparia
gcacctgccccgtgatcgccaccagtggaacggaatcgagcaaagcatcagcaaacccggacacgaggttcgtagcgccagggccagatgtcgcaatgcagacaccaacacggcccgtggcacgagcatacccctccgcggcaaagatcccgccttgctcgtggcgaggcaggacgttgcgtatggaatcagagcgagtc

SEQ ID NO: 1050 - DNA, 200 bp, Kochia scoparia
ctggtggcgatcacggggcaggtgccgcggcgaatgattgggacggatgcttttcaggagactcctattgttgaggtaacacggtctattaccaagcataattatctggtattagatgttgaggatattcctagaattgttaaggaggctttctttttggctaattctggtagacctggacctgttttgattgatattcc

SEQ ID NO: 1051 - DNA, 200 bp, Kochia scoparia
ggaatatcaatcaaaacaggtccaggtctaccagaattagccaaaaagaaagcctccttaacaattctaggaatatcctcaacatctaataccagataattatgcttggtaatagaccgtgttacctcaacaataggagtctcctgaaaagcatccgtcccaatcattcgccgcggcacctgccccgtgatcgccaccag

SEQ ID NO: 1052 - DNA, 200 bp, Kochia scoparia
ctggacctgttttgattgatattcctaaggatattcagcagcaattggttgtgcctgattggggtcagggggttaggttaggtgggtatgtgtctaggttgccgaaatcggagttttcggccaatgatgaggggcttcttgagcagattgtgaggttgatgagtgaggctaagaagcctgtgttgtatgtgggaggcggg

SEQ ID NO: 1053 - DNA, 200 bp, Kochia scoparia
cccgcctcccacatacaacacaggcttcttagcctcactcatcaacctcacaatctgctcaagaagcccctcatcattggccgaaaactccgatttcggcaacctagacacatacccacctaacctaaccccctgaccccaatcaggcacaaccaattgctgctgaatatccttaggaatatcaatcaaaacaggtccag

SEQ ID NO: 1054 - DNA, 200 bp, Kochia scoparia
gcctgtgttgtatgtgggaggcgggtgtttgaattctggggaggagttgaggaaattcgtcgagttgactgggattccggtggctagtactttaatgggtttgggcgcttatccctgtaatgatgacttgtctcttcatatgttgggtatgcatgggaccgtgtatgctaattatgctgttgataaggcagatttgttgc

SEQ ID NO: 1055 - DNA, 200 bp, Kochia scoparia
gcaacaaatctgccttatcaacagcataattagcatacacggtcccatgcatacccaacatatgaagagacaagtcatcattacagggataagcgcccaaacccattaaagtactagccaccggaatcccagtcaactcgacgaatttcctcaactcctccccagaattcaaacacccgcctcccacatacaacacaggc

SEQ ID NO: 1056 - DNA, 200 bp, Kochia scoparia
gctgttgataaggcagatttgttgcttgcctttggggttaggtttgatgatcgtgtgacagggaagcttgaggcgtttgctagccgggctaagatcgtgcatattgatattgattctgctgagattgggaagaataagcaaccccatgtgtcaatatgtgctgatgtcaagtatgcgttgaagggtatgaataagatttt

SEQ ID NO: 1057 - DNA, 200 bp, Kochia scoparia
aaaatcttattcatacccttcaacgcatacttgacatcagcacatattgacacatggggttgcttattcttcccaatctcagcagaatcaatatcaatatgcacgatcttagcccggctagcaaacgcctcaagcttccctgtcacacgatcatcaaacctaaccccaaaggcaagcaacaaatctgccttatcaacagc

SEQ ID NO: 1058 - DNA, 200 bp, Kochia scoparia
cgttgaagggtatgaataagattttggagtctaggaaagggaagttgaatttgaattactctagctggagggaggaattgggtgagcaaaagaagaaattcccattgtcttttaagaccttcggggaagcgattcctcctcagtatgccattcagatgcttgatgagctgaccaatggtaacgctattattagtactggt

SEQ ID NO: 1059 - DNA, 200 bp, Kochia scoparia
accagtactaataatagcgttaccattggtcagctcatcaagcatctgaatggcatactgaggaggaatcgcttccccgaaggtcttaaaagacaatgggaatttcttcttttgctcacccaattcctccctccagctagagtaattcaaattcaacttccctttcctagactccaaaatcttattcatacccttcaacg

SEQ ID NO: 1060 - DNA, 200 bp, Kochia scoparia
tggtaacgctattattagtactggtgttgggcaacatcaaatgtgggctgctcagcattacaagtacagaaaccctcgccaatggctgacctcaggtgggttgggtgccatgggttttggtctaccagccgccattggagctgctgtggctcgacctgatgcagtggtggttgatattgatggcgatgggagtttcatta

SEQ ID NO: 1061 - DNA, 200 bp, Kochia scoparia
taatgaaactcccatcgccatcaatatcaaccaccactgcatcaggtcgagccacagcagctccaatggcggctggtagaccaaaacccatggcacccaacccacctgaggtcagccattggcgagggtttctgtacttgtaatgctgagcagcccacatttgatgttgcccaacaccagtactaataatagcgttacca

SEQ ID NO: 1062 - DNA, 200 bp, Kochia scoparia
attgatggcgatgggagtttcattatgaatgttcaagagttggctactattagggtggaaaatctccctgttaagataatgcttttgaataaccaacatttaggtatggtggttcaatgggaagataggttttataaagccaatagggcacatacttaccttggaaacccttcaaaagagtctgaaatcttcccggatat

SEQ ID NO: 1063 - DNA, 200 bp, Kochia scoparia
atatccgggaagatttcagactcttttgaagggtttccaaggtaagtatgtgccctattggctttataaaacctatcttcccattgaaccaccatacctaaatgttggttattcaaaagcattatcttaacagggagattttccaccctaatagtagccaactcttgaacattcataatgaaactcccatcgccatcaat

SEQ ID NO: 1064 - DNA, 200 bp, Kochia scoparia
aagagtctgaaatcttcccggatatgcttaaatttgctgaggcgtgtgatattcctgctgctcgtgtcaccaaggttggagatttgagggcggccatgcagacaatgttggatactccgggaccttacctgcttgatgtgattgtacctcatcaggagcatgtgctgcctatgattcctagtggtgcagccttcaaggat

SEQ ID NO: 1065 - DNA, 200 bp, Kochia scoparia
atccttgaaggctgcaccactaggaatcataggcagcacatgctcctgatgaggtacaatcacatcaagcaggtaaggtcccggagtatccaacattgtctgcatggccgccctcaaatctccaaccttggtgacacgagcagcaggaatatcacacgcctcagcaaatttaagcatatccgggaagatttcagactctt

SEQ ID NO: 1066 - DNA, 200 bp, Kochia scoparia
tcctagtggtgcagccttcaaggatatcattaacgaaggtgatggaagaacaagttattgatgttcgtatcgatggttgaaagcatctatagagggggaagcaaaataagaataataatctgtatgtataatagtatgttccttttaaatttttagcgtctgtttacttgtttttttagttttctagttagtttgtcgtt

SEQ ID NO: 1067 - DNA, 200 bp, Kochia scoparia
aacgacaaactaactagaaaactaaaaaaacaagtaaacagacgctaaaaatttaaaaggaacatactattatacatacagattattattcttattttgcttccccctctatagatgctttcaaccatcgatacgaacatcaataacttgttcttccatcaccttcgttaatgatatccttgaaggctgcaccactagga

SEQ ID NO: 1068 - DNA, 200 bp, Kochia scoparia
atagaagttatggcaatcgcggggtgtttgttttgtgggaatagatgggtgggaatgggaattttaattccaatgtcctaactcccacgtttgtttgtagggaatgagattatttgagagaaggggaatgagattatttggggtcaatttcaatagttttattacatgagaggttggtaacttggtatttgggtgggaat

SEQ ID NO: 1069 - DNA, 200 bp, Kochia scoparia
attcccacccaaataccaagttaccaacctctcatgtaataaaactattgaaattgaccccaaataatctcattccccttctctcaaataatctcattccctacaaacaaacgtgggagttaggacattggaattaaaattcccattcccacccatctattcccacaaaacaaacaccccgcgattgccataacttctat

SEQ ID NO: 1070 - DNA, 200 bp, Kochia scoparia
ggtaacttggtatttgggtgggaattcatatttcttttgtttttttcttttgtttttgctgaaagttatttcttcatctcattttatttccttttttaaaaaaaaaattctcatttatttccaaattaataccaagcaagagattgagataattttatcaattttcacatttcaatttacattctcattttcatttccac

SEQ ID NO: 1071 - DNA, 200 bp, Kochia scoparia
gtggaaatgaaaatgagaatgtaaattgaaatgtgaaaattgataaaattatctcaatctcttgcttggtattaatttggaaataaatgagaattttttttttaaaaaaggaaataaaatgagatgaagaaataactttcagcaaaaacaaaagaaaaaaacaaaagaaatatgaattcccacccaaataccaagttacc

SEQ ID NO: 1072 - DNA, 200 bp, Kochia scoparia
tttacattctcattttcatttccacttgtcaaatgtcccggcatgacatggaacacgcaacacaccataagctcattagatcatttgtcggagtttcgattttcagcatatacacctattgacctgtcaccatccatggtaaaatgttgatatgtgggctaagccacatcacgtaatgtcgtaatctgcttttaaaagca

SEQ ID NO: 1073 - DNA, 200 bp, Kochia scoparia
tgcttttaaaagcagattacgacattacgtgatgtggcttagcccacatatcaacattttaccatggatggtgacaggtcaataggtgtatatgctgaaaatcgaaactccgacaaatgatctaatgagcttatggtgtgttgcgtgttccatgtcatgccgggacatttgacaagtggaaatgaaaatgagaatgtaaa

SEQ ID NO: 1074 - DNA, 200 bp, Kochia scoparia
atgtcgtaatctgcttttaaaagcacattaagttacataattttcaacacgcgcattgctatcaacttgcattgttccacttgtatatcattgctgaagtattataatcgagcgatctgtttttgcacaatacagaatcggatttgcaacagaaaatagaaacaagtaaaatcaggatcagatgctcaaagcctcatgtc

SEQ ID NO: 1075 - DNA, 200 bp, Kochia scoparia
gacatgaggctttgagcatctgatcctgattttacttgtttctattttctgttgcaaatccgattctgtattgtgcaaaaacagatcgctcgattataatacttcagcaatgatatacaagtggaacaatgcaagttgatagcaatgcgcgtgttgaaaattatgtaacttaatgtgcttttaaaagcagattacgacat

SEQ ID NO: 1076 - DNA, 200 bp, Kochia scoparia
gatcagatgctcaaagcctcatgtcattgtttccatttaaacaaaaaaacatgtcattataattcccatgcccatatatttaggtaaatattcctgctcggatattctacgaaaaatagaaaattaaaggccatataggtctaatgaactagctaaatcgaatctgtagaagatttttaacattttaactttgtaaaata

SEQ ID NO: 1077 - DNA, 200 bp, Kochia scoparia
tattttacaaagttaaaatgttaaaaatcttctacagattcgatttagctagttcattagacctatatggcctttaattttctatttttcgtagaatatccgagcaggaatatttacctaaatatatgggcatgggaattataatgacatgtttttttgtttaaatggaaacaatgacatgaggctttgagcatctgatc

SEQ ID NO: 1078 - DNA, 200 bp, Kochia scoparia
tttaacattttaactttgtaaaatatgaaaataattattcttctaagctttgcacaatagtcgcattttgttgttgtcgtataaaaaaaacattgcatagacaataacttagatttccaacgaattaactactccgtaacttgtattccacgtgcatagaaaatgtagcattttatgtttatttctctatttataagtgg

SEQ ID NO: 1079 - DNA, 200 bp, Kochia scoparia
ccacttataaatagagaaataaacataaaatgctacattttctatgcacgtggaatacaagttacggagtagttaattcgttggaaatctaagttattgtctatgcaatgttttttttatacgacaacaacaaaatgcgactattgtgcaaagcttagaagaataattattttcatattttacaaagttaaaatgttaaa

SEQ ID NO: 1080 - DNA, 200 bp, Kochia scoparia
tgtttatttctctatttataagtggggcaaatcttgtaaataactatctatgtattcaataaaaataatcatgtggtgtcttgtttgatttgtattaatgagtagattatcaacatttaattattataatttttacatatctacatttaaagatataaacattataagacatgtattgagaaacatataaatagtaaatg

SEQ ID NO: 1081 - DNA, 200 bp, Kochia scoparia
catttactatttatatgtttctcaatacatgtcttataatgtttatatctttaaatgtagatatgtaaaaattataataattaaatgttgataatctactcattaatacaaatcaaacaagacaccacatgattatttttattgaatacatagatagttatttacaagatttgccccacttataaatagagaaataaaca

SEQ ID NO: 1082 - DNA, 200 bp, Kochia scoparia
ttgagaaacatataaatagtaaatgactgcgttttcacggaacaaaatgaataccttatataaaatgtaattatttgttcatttatttttaattttgtcactgtatgacatttttagttatttttttattttattattatattttattttatactttcaccgtttttaaaatttttaaaaaagtaattttttatctctca

SEQ ID NO: 1083 - DNA, 200 bp, Kochia scoparia
tgagagataaaaaattacttttttaaaaattttaaaaacggtgaaagtataaaataaaatataataataaaataaaaaaataactaaaaatgtcatacagtgacaaaattaaaaataaatgaacaaataattacattttatataaggtattcattttgttccgtgaaaacgcagtcatttactatttatatgtttctcaa

SEQ ID NO: 1084 - DNA, 200 bp, Kochia scoparia
taaaaaagtaattttttatctctcacaaaaaatgtcccttgtcgcaagtttttgaaaacaaaagaagtaataaaactcaattatggattgagagctacatataacatatataagaaaatgaatgtatgactcaacatactcaataaataaattggattttgcgatcaagtttgtgggctttatcctttcaattaaaatgt

SEQ ID NO: 1085 - DNA, 200 bp, Kochia scoparia
acattttaattgaaaggataaagcccacaaacttgatcgcaaaatccaatttatttattgagtatgttgagtcatacattcattttcttatatatgttatatgtagctctcaatccataattgagttttattacttcttttgttttcaaaaacttgcgacaagggacattttttgtgagagataaaaaattactttttta

SEQ ID NO: 1086 - DNA, 200 bp, Kochia scoparia
ggctttatcctttcaattaaaatgtatacttgatgcaacacaatctaatgagtaatgacatctttgatatgaagtgtatcaaatatctaaataaattatttcaaaaatggagaacaaatattaaccacgaaatgagtagtagaaaaaaggaaacaccttttttatttgcattattattattactttatgtaggaaaactc

SEQ ID NO: 1087 - DNA, 200 bp, Kochia scoparia
gagttttcctacataaagtaataataataatgcaaataaaaaaggtgtttccttttttctactactcatttcgtggttaatatttgttctccatttttgaaataatttatttagatatttgatacacttcatatcaaagatgtcattactcattagattgtgttgcatcaagtatacattttaattgaaaggataaagcc

SEQ ID NO: 1088 - DNA, 200 bp, Kochia scoparia
attattactttatgtaggaaaactccatttggagtcttgacaaaaacaaatgaatgaaaaaagactttttggttttggtaatttaagctaaaaagaaaaagaaaaaagaaaaaagaaaaaggagaaaaccagagttgagcgcctccactagttgttttcctttccttcctcggaagaaccctatttcttcctccctcata

SEQ ID NO: 1089 - DNA, 200 bp, Kochia scoparia
tatgagggaggaagaaatagggttcttccgaggaaggaaaggaaaacaactagtggaggcgctcaactctggttttctcctttttcttttttcttttttctttttctttttagcttaaattaccaaaaccaaaaagtcttttttcattcatttgtttttgtcaagactccaaatggagttttcctacataaagtaataat

SEQ ID NO: 1090 - DNA, 200 bp, Kochia scoparia
gaaccctatttcttcctccctcatatgatatccttccttcaaactccacactcctctctttcattttctctctgatcataccttcaaccttcaacaatggcgtctacttctgcaaatcccacttttacccctttcaccagtaaaccccttaaaccccgttctccctttcactctttcccatttccctcaaaccccaaaac

SEQ ID NO: 1091 - DNA, 200 bp, Kochia scoparia
gttttggggtttgagggaaatgggaaagagtgaaagggagaacggggtttaaggggtttactggtgaaaggggtaaaagtgggatttgcagaagtagacgccattgttgaaggttgaaggtatgatcagagagaaaatgaaagagaggagtgtggagtttgaaggaaggatatcatatgagggaggaagaaatagggttc

SEQ ID NO: 1092 - DNA, 200 bp, Kochia scoparia
tcccatttccctcaaaccccaaaaccccttcctcttcatttcgcaacctcaaaatcacatcttctctctcttcttcacaacccccgaaaccaccttccgccgtcaaaacccactcaccaccttcccctctcacaaccgacgaacccccgcaaggttttgtttcccgatttgcccctgaccaacccagaaaaggctgcgat

SEQ ID NO: 1093 - DNA, 200 bp, Kochia scoparia
atcgcagccttttctgggttggtcaggggcaaatcgggaaacaaaaccttgcgggggttcgtcggttgtgagaggggaaggtggtgagtgggttttgacggcggaaggtggtttcgggggttgtgaagaagagagagaagatgtgattttgaggttgcgaaatgaagaggaaggggttttggggtttgagggaaatggga

SEQ ID NO: 1094 - DNA, 200 bp, Kochia scoparia
tgaccaacccagaaaaggctgcgatgtcctcgttgaggccctcgagcgggagggcgtcaccgacgtgttcgcttatcctggtggcgcatcaatggagattcatcaagctctgactcgctctgattccatacgcaacgtcctgcctcgccacgagcaaggcgggatctttgccgcggaggggtatgctcgtgccacgggcc

SEQ ID NO: 1095 - DNA, 200 bp, Kochia scoparia
ggcccgtggcacgagcatacccctccgcggcaaagatcccgccttgctcgtggcgaggcaggacgttgcgtatggaatcagagcgagtcagagcttgatgaatctccattgatgcgccaccaggataagcgaacacgtcggtgacgccctcccgctcgagggcctcaacgaggacatcgcagccttttctgggttggtca

SEQ ID NO: 1096 - DNA, 200 bp, Kochia scoparia
gaggggtatgctcgtgccacgggccgtgttggtgtctgcattgcgacatctggccctggcgctacgaacctcgtgtccgggtttgctgatgctttgctcgattccgttccactggtggcgatcacggggcaggtgccgcggcgaatgattgggacggatgcttttcaggagactcctattgttgaggtaacacggtctat

SEQ ID NO: 1097 - DNA, 200 bp, Kochia scoparia
atagaccgtgttacctcaacaataggagtctcctgaaaagcatccgtcccaatcattcgccgcggcacctgccccgtgatcgccaccagtggaacggaatcgagcaaagcatcagcaaacccggacacgaggttcgtagcgccagggccagatgtcgcaatgcagacaccaacacggcccgtggcacgagcatacccctc

SEQ ID NO: 1098 - DNA, 200 bp, Kochia scoparia
ctattgttgaggtaacacggtctattaccaagcataattatctggtattagatgttgaggatattcctagaattgttaaggaggctttctttttggctaattctggtagacctggacctgttttgattgatattcctaaggatattcagcagcaattggttgtgcctgattgggatcagggggttaggttaggtgggtat

SEQ ID NO: 1099 - DNA, 200 bp, Kochia scoparia
atacccacctaacctaaccccctgatcccaatcaggcacaaccaattgctgctgaatatccttaggaatatcaatcaaaacaggtccaggtctaccagaattagccaaaaagaaagcctccttaacaattctaggaatatcctcaacatctaataccagataattatgcttggtaatagaccgtgttacctcaacaatag

SEQ ID NO: 1100 - DNA, 200 bp, Kochia scoparia
tcagggggttaggttaggtgggtatgtgtctaggttgccgaaatcggtgttttcggccaatgatgaggggcttcttgagcagattgtgaggttgatgagtgaggctaagaagcctgtgttgtatgtgggaggcgggtgtttgaattctggggaggagttgaggaaattcgtcgagttgactgggattccggtggctagta

SEQ ID NO: 1101 - DNA, 200 bp, Kochia scoparia
tactagccaccggaatcccagtcaactcgacgaatttcctcaactcctccccagaattcaaacacccgcctcccacatacaacacaggcttcttagcctcactcatcaacctcacaatctgctcaagaagcccctcatcattggccgaaaacaccgatttcggcaacctagacacatacccacctaacctaaccccctga

SEQ ID NO: 1102 - DNA, 200 bp, Kochia scoparia
ttgactgggattccggtggctagtactttaatgggtttgggcgcttatccctgtaatgatgacttgtctcttcatatgttgggtatgcacgggaccgtgtatgctaattatgctgttgataaggcagatttgttgcttgcctttggggttaggtttgatgatcgtgtgacagggaagcttgaggcgtttgctagccgggc

SEQ ID NO: 1103 - DNA, 200 bp, Kochia scoparia
gcccggctagcaaacgcctcaagcttccctgtcacacgatcatcaaacctaaccccaaaggcaagcaacaaatctgccttatcaacagcataattagcatacacggtcccgtgcatacccaacatatgaagagacaagtcatcattacagggataagcgcccaaacccattaaagtactagccaccggaatcccagtcaa

SEQ ID NO: 1104 - DNA, 200 bp, Kochia scoparia
agcttgaggcgtttgctagccgggctaagatcgtgcatattgatattgattctgctgagattgggaagaataagcaaccccatgtgtcaatatgtgctgatgtcaagtatgcgttgaagggtatgaataagattttggagtctaggaaagggaagttgaatttgaattactctagctggagggaggaattgggtgagcaa

SEQ ID NO: 1105 - DNA, 200 bp, Kochia scoparia
ttgctcacccaattcctccctccagctagagtaattcaaattcaacttccctttcctagactccaaaatcttattcatacccttcaacgcatacttgacatcagcacatattgacacatggggttgcttattcttcccaatctcagcagaatcaatatcaatatgcacgatcttagcccggctagcaaacgcctcaagct

SEQ ID NO: 1106 - DNA, 200 bp, Kochia scoparia
ctggagggaggaattgggtgagcaaaagaagaaattcccattgtcttttaagaccttcggggaagcgattcctcctcagtatgccattcagatgcttgatgagctgaccaatggtaacgctattattagtactggtgttgggcaacatcaaatgtgggctgctcagcattacaagtacagaaaccctcgccaatggctga

SEQ ID NO: 1107 - DNA, 200 bp, Kochia scoparia
tcagccattggcgagggtttctgtacttgtaatgctgagcagcccacatttgatgttgcccaacaccagtactaataatagcgttaccattggtcagctcatcaagcatctgaatggcatactgaggaggaatcgcttccccgaaggtcttaaaagacaatgggaatttcttcttttgctcacccaattcctccctccag

SEQ ID NO: 1108 - DNA, 200 bp, Kochia scoparia
tacagaaaccctcgccaatggctgacctcaggtgggttgggtgccatgggttttggtctaccagccgccattggagctgctgtggctcgacctgatgcagtggtggttgatattgatggcgatgggagtttcattatgaatgttcaagagttggctactattagggtggaaaatctccctgttaagataatgcttttgaa

SEQ ID NO: 1109 - DNA, 200 bp, Kochia scoparia
ttcaaaagcattatcttaacagggagattttccaccctaatagtagccaactcttgaacattcataatgaaactcccatcgccatcaatatcaaccaccactgcatcaggtcgagccacagcagctccaatggcggctggtagaccaaaacccatggcacccaacccacctgaggtcagccattggcgagggtttctgta

SEQ ID NO: 1110 - DNA, 200 bp, Kochia scoparia
tccctgttaagataatgcttttgaataaccaacatttaggtatggtggttcaatgggaagataggttttataaagccaatagggcacatacttaccttggaaacccttcaaaagagtctgaaatcttcccggatatgcttaaatttgctgaggcgtgtgatattcctgctgctcgtgtcaccaaggttggagatttgagg

SEQ ID NO: 1111 - DNA, 200 bp, Kochia scoparia
cctcaaatctccaaccttggtgacacgagcagcaggaatatcacacgcctcagcaaatttaagcatatccgggaagatttcagactcttttgaagggtttccaaggtaagtatgtgccctattggctttataaaacctatcttcccattgaaccaccatacctaaatgttggttattcaaaagcattatcttaacaggga

SEQ ID NO: 1112 - DNA, 200 bp, Kochia scoparia
tgtcaccaaggttggagatttgagggcggccatgcagacaatgttggatactccgggaccttacctgcttgatgtgattgtacctcatcaggagcatgtgctgcctatgattcctagtggtgcagccttcaaggatatcattaacgaaggtgatggaagaacaagttattgatgttcgtatcgatggttgaaagcatcta

SEQ ID NO: 1113 - DNA, 200 bp, Kochia scoparia
tagatgctttcaaccatcgatacgaacatcaataacttgttcttccatcaccttcgttaatgatatccttgaaggctgcaccactaggaatcataggcagcacatgctcctgatgaggtacaatcacatcaagcaggtaaggtcccggagtatccaacattgtctgcatggccgccctcaaatctccaaccttggtgaca

SEQ ID NO: 1114 - DNA, 200 bp, Kochia scoparia
tcgtatcgatggttgaaagcatctatagagggggaagcaaaataagaataataatctgtatgtataatagtatgttccttttaaatttttagcgtctgtttacttgtttttttagttttctagttagtttgtcgttgttatgttgcttgttactttgagaatgcttttttgtagttttcaagagacgagtatggatgatc

SEQ ID NO: 1115 - DNA, 200 bp, Kochia scoparia
gatcatccatactcgtctcttgaaaactacaaaaaagcattctcaaagtaacaagcaacataacaacgacaaactaactagaaaactaaaaaaacaagtaaacagacgctaaaaatttaaaaggaacatactattatacatacagattattattcttattttgcttccccctctatagatgctttcaaccatcgatacga

SEQ ID NO: 1116 - DNA, 200 bp, Kochia scoparia
tttcaagagacgagtatggatgatcttcctatattgttcaaagatttcaccaagtggtctttggactatgtatgttgtatttgatgtttggttagttatgttaattgtcctaatgcaagcgttgttaaaatcgccatttgacactcattagaccttacttctatatatttgtaagctgcttattggatgattttaaacac

SEQ ID NO: 1117 - DNA, 200 bp, Kochia scoparia
gtgtttaaaatcatccaataagcagcttacaaatatatagaagtaaggtctaatgagtgtcaaatggcgattttaacaacgcttgcattaggacaattaacataactaaccaaacatcaaatacaacatacatagtccaaagaccacttggtgaaatctttgaacaatataggaagatcatccatactcgtctcttgaaa

SEQ ID NO: 1118 - DNA, 200 bp, Kochia scoparia
ctgcttattggatgattttaaacacctccttgttttgcttgtctaatggacttttgttgctatacataataatgtttaactccaaaacaaccaaaaaaagattctggcacaaccagttctactaccataaaataaggttatgaagtgctttagagataagcacaagcttgggaagatagtagtggctgctcatacttttg

SEQ ID NO: 1119 - DNA, 200 bp, Kochia scoparia
caaaagtatgagcagccactactatcttcccaagcttgtgcttatctctaaagcacttcataaccttattttatggtagtagaactggttgtgccagaatctttttttggttgttttggagttaaacattattatgtatagcaacaaaagtccattagacaagcaaaacaaggaggtgtttaaaatcatccaataagcag

SEQ ID NO: 1120 - DNA, 200 bp, Kochia scoparia
atagtagtggctgctcatacttttggttcttctgaaaagaacatatgattgtgaagaaactgcctaaacatttgcatttccttgaggttgaggtttgtagatgattagtgtgaaagccctttgcaggtgttgagaacttgagattgaggtttaggttagagatttggagtggaagttggtaagtacgacttttgccgaaa

SEQ ID NO: 1121 - DNA, 200 bp, Kochia scoparia
tttcggcaaaagtcgtacttaccaacttccactccaaatctctaacctaaacctcaatctcaagttctcaacacctgcaaagggctttcacactaatcatctacaaacctcaacctcaaggaaatgcaaatgtttaggcagtttcttcacaatcatatgttcttttcagaagaaccaaaagtatgagcagccactactat

SEQ ID NO: 1122 - DNA, 200 bp, Kochia scoparia
ttggtaagtacgacttttgccgaaacttcaggagcataacgtgtctcggcaagttaagcaggcaagcatttacaaggaaagggtatttgaacaataggtttatattgatcccaagagtatgctatacatttgtcatgatcgaacaacttgctacttaagagatttgtgtcatgcctttgagttattgagaaaaggagtga

SEQ ID NO: 1123 - DNA, 200 bp, Kochia scoparia
tcactccttttctcaataactcaaaggcatgacacaaatctcttaagtagcaagttgttcgatcatgacaaatgtatagcatactcttgggatcaatataaacctattgttcaaataccctttccttgtaaatgcttgcctgcttaacttgccgagacacgttatgctcctgaagtttcggcaaaagtcgtacttaccaa

SEQ ID NO: 1124 - DNA, 200 bp, Kochia scoparia
tttgagttattgagaaaaggagtgagctagatccagaataacttgagggaatttagagacttcattcctatgaatccaaatggcccgtagtatggttaaaaactggctacatttaattcaatctcttttaacaaattaaaggacaaaaatcttgcaaccattgttccagtgaaatattagctgctaggtccgtgcgaatt

SEQ ID NO: 1125 - DNA, 200 bp, Kochia scoparia
aattcgcacggacctagcagctaatatttcactggaacaatggttgcaagatttttgtcctttaatttgttaaaagagattgaattaaatgtagccagtttttaaccatactacgggccatttggattcataggaatgaagtctctaaattccctcaagttattctggatctagctcactccttttctcaataactcaaa

SEQ ID NO: 1126 - DNA, 200 bp, Kochia scoparia
attagctgctaggtccgtgcgaattcctagaacaccaagatcgaaaagttcataaaccctaaatcctggcttccttaaattagttttaactgctgaagcatggcatagaacttcatcttcttgtaaatacttcctcggtttgttttagatgttatatttatttgggcctaaactttggaccaaaattagaaaattttaat

SEQ ID NO: 1127 - DNA, 200 bp, Kochia scoparia
attaaaattttctaattttggtccaaagtttaggcccaaataaatataacatctaaaacaaaccgaggaagtatttacaagaagatgaagttctatgccatgcttcagcagttaaaactaatttaaggaagccaggatttagggtttatgaacttttcgatcttggtgttctaggaattcgcacggacctagcagctaat

SEQ ID NO: 1128 - DNA, 200 bp, Kochia scoparia
tggaccaaaattagaaaattttaattagaagatgtaattagggaaatgatgaattaattaaacaactaaccaacctaatctctaccactaaacaacctaccaaccacagaccacctccaaaccctagccgccatcaccgccgccgtcaccaaaccaccatcgactaccagactcaaatctccaaatagtcgcgaccacca

SEQ ID NO: 1129 - DNA, 200 bp, Kochia scoparia
tggtggtcgcgactatttggagatttgagtctggtagtcgatggtggtttggtgacggcggcggtgatggcggctagggtttggaggtggtctgtggttggtaggttgtttagtggtagagattaggttggttagttgtttaattaattcatcatttccctaattacatcttctaattaaaattttctaattttggtcca

SEQ ID NO: 1130 - DNA, 200 bp, Kochia scoparia
aatctccaaatagtcgcgaccaccaccaaacccacgccatgaccatcgaccaccaccaaacccttgctgcaaaccacactttgagtcaaccaccgcaacaatttttgagcaatttatgagattttgaactaatttcgaacaacttatgagattttcaaagaatttctcagatttcgaactaattgctttaagattttgaa

SEQ ID NO: 1131 - DNA, 200 bp, Kochia scoparia
ttcaaaatcttaaagcaattagttcgaaatctgagaaattctttgaaaatctcataagttgttcgaaattagttcaaaatctcataaattgctcaaaaattgttgcggtggttgactcaaagtgtggtttgcagcaagggtttggtggtggtcgatggtcatggcgtgggtttggtggtggtcgcgactatttggagatt

SEQ ID NO: 1132 - DNA, 200 bp, Kochia scoparia
gaactaattgctttaagattttgaacaatttgacaaatttcaaaccaatttttgagatttcaaatcaatttcctctagctttcgaaccaacttgaggagatttcgaataagttttaagaattcgaatcaatttctttgagctttgaccgatttgtgtgttttgggtggttcaatgggggcactttggtggtctgtgtggt

SEQ ID NO: 1133 - DNA, 200 bp, Kochia scoparia
accacacagaccaccaaagtgcccccattgaaccacccaaaacacacaaatcggtcaaagctcaaagaaattgattcgaattcttaaaacttattcgaaatctcctcaagttggttcgaaagctagaggaaattgatttgaaatctcaaaaattggtttgaaatttgtcaaattgttcaaaatcttaaagcaattagttc

SEQ ID NO: 1134 - DNA, 200 bp, Kochia scoparia
ggggcactttggtggtctgtgtggtgctgtaaaacattgatgtgcgaatgtgcgattggggtggtgcgattggggtggtgcggtggtgtgtagctgggtggtatgcagatatggtgagccgtggatgtcatgggtggttgttgatgcggtgtattagagatattaattgcttaagatgttaataatatttgattagttta

SEQ ID NO: 1135 - DNA, 200 bp, Kochia scoparia
taaactaatcaaatattattaacatcttaagcaattaatatctctaatacaccgcatcaacaaccacccatgacatccacggctcaccatatctgcataccacccagctacacaccaccgcaccaccccaatcgcaccaccccaatcgcacattcgcacatcaatgttttacagcaccacacagaccaccaaagtgcccc

SEQ ID NO: 1136 - DNA, 200 bp, Kochia scoparia
atggcgtctacttctgcaaatcccacttttacccctttcaccagtaaaccccttaaaccccgttctccctttcactctttcccatttccctcaaaccccaaaaccccttcctcttcatttcgcaacctcaaaatcacatcttctctctcttcttcacaacccccgaaaccaccttccgccgtcaaaacccactcaccacc

SEQ ID NO: 1137 - DNA, 200 bp, Kochia scoparia
ggtggtgagtgggttttgacggcggaaggtggtttcgggggttgtgaagaagagagagaagatgtgattttgaggttgcgaaatgaagaggaaggggttttggggtttgagggaaatgggaaagagtgaaagggagaacggggtttaaggggtttactggtgaaaggggtaaaagtgggatttgcagaagtagacgccat

SEQ ID NO: 1138 - DNA, 200 bp, Kochia scoparia
ccgccgtcaaaacccactcaccaccttcccctctcacaaccgacgaacccccgcaaggttttgtttcccgatttgcccctgaccaacccagaaaaggctgcgatgtcctcgttgaggccctcgagcgggagggcgtcaccgacgtgttcgcttatcctggtggcgcatcaatggagattcatcaagctctgactcgctct

SEQ ID NO: 1139 - DNA, 200 bp, Kochia scoparia
agagcgagtcagagcttgatgaatctccattgatgcgccaccaggataagcgaacacgtcggtgacgccctcccgctcgagggcctcaacgaggacatcgcagccttttctgggttggtcaggggcaaatcgggaaacaaaaccttgcgggggttcgtcggttgtgagaggggaaggtggtgagtgggttttgacggcgg

SEQ ID NO: 1140 - DNA, 200 bp, Kochia scoparia
gattcatcaagctctgactcgctctgattccatacgcaacgtcctgcctcgccacgagcaaggcgggatctttgccgcggaggggtatgctcgtgccacgggccgtgttggtgtctgcattgcgacatctggccctggcgctacgaacctcgtgtccgggtttgctgatgctttgctcgattccgttccactggtggcga

SEQ ID NO: 1141 - DNA, 200 bp, Kochia scoparia
tcgccaccagtggaacggaatcgagcaaagcatcagcaaacccggacacgaggttcgtagcgccagggccagatgtcgcaatgcagacaccaacacggcccgtggcacgagcatacccctccgcggcaaagatcccgccttgctcgtggcgaggcaggacgttgcgtatggaatcagagcgagtcagagcttgatgaatc

SEQ ID NO: 1142 - DNA, 200 bp, Kochia scoparia
ctcgattccgttccactggtggcgatcacggggcaggtgccgcggcgaatgattgggacggatgcttttcaggagactcctattgttgaggtaacacggtctattaccaagcataattatctggtattagatgttgaggatattcctagaattgttaaggaggctttctttttggctaattctggtagacctggacctgt

SEQ ID NO: 1143 - DNA, 200 bp, Kochia scoparia
acaggtccaggtctaccagaattagccaaaaagaaagcctccttaacaattctaggaatatcctcaacatctaataccagataattatgcttggtaatagaccgtgttacctcaacaataggagtctcctgaaaagcatccgtcccaatcattcgccgcggcacctgccccgtgatcgccaccagtggaacggaatcgag

SEQ ID NO: 1144 - DNA, 200 bp, Kochia scoparia
ctaattctggtagacctggacctgttttgattgatattcctaaggatattcagcagcaattggttgtgcctgattgggatcagggggttaggttaggtgggtatgtgtctaggttgccgaaatcggtgttttcggccaatgatgaggggcttcttgagcagattgtgaggttgatgagtgaggctaagaagcctgtgttg

SEQ ID NO: 1145 - DNA, 200 bp, Kochia scoparia
caacacaggcttcttagcctcactcatcaacctcacaatctgctcaagaagcccctcatcattggccgaaaacaccgatttcggcaacctagacacatacccacctaacctaaccccctgatcccaatcaggcacaaccaattgctgctgaatatccttaggaatatcaatcaaaacaggtccaggtctaccagaattag

SEQ ID NO: 1146 - DNA, 200 bp, Kochia scoparia
gagtgaggctaagaagcctgtgttgtatgtgggaggcgggtgtttgaattctggggaggagttgaggaaattcgtcgagttgactgggattccggtggctagtactttaatgggtttgggcgcttatccctgtaatgatgacttgtctcttcatatgttgggtatgcacgggaccgtgtatgctaattatgctgttgata

SEQ ID NO: 1147 - DNA, 200 bp, Kochia scoparia
tatcaacagcataattagcatacacggtcccgtgcatacccaacatatgaagagacaagtcatcattacagggataagcgcccaaacccattaaagtactagccaccggaatcccagtcaactcgacgaatttcctcaactcctccccagaattcaaacacccgcctcccacatacaacacaggcttcttagcctcactc

SEQ ID NO: 1148 - DNA, 200 bp, Kochia scoparia
gtgtatgctaattatgctgttgataaggcagatttgttgcttgcctttggggttaggtttgatgatcgtgtgacagggaagcttgaggcgtttgctagccgggctaagatcgtgcatattgatattgattctgctgagattgggaagaataagcaaccccatgtgtcaatatgtgctgatgtcaagtatgcgttgaaggg

SEQ ID NO: 1149 - DNA, 200 bp, Kochia scoparia
cccttcaacgcatacttgacatcagcacatattgacacatggggttgcttattcttcccaatctcagcagaatcaatatcaatatgcacgatcttagcccggctagcaaacgcctcaagcttccctgtcacacgatcatcaaacctaaccccaaaggcaagcaacaaatctgccttatcaacagcataattagcatacac

SEQ ID NO: 1150 - DNA, 200 bp, Kochia scoparia
ctgatgtcaagtatgcgttgaagggtatgaataagattttggagtctaggaaagggaagttgaatttgaattactctagctggagggaggaattgggtgagcaaaagaagaaattcccattgtcttttaagaccttcggggaagcgattcctcctcagtatgccattcagatgcttgatgagctgaccaatggtaacgct

SEQ ID NO: 1151 - DNA, 200 bp, Kochia scoparia
agcgttaccattggtcagctcatcaagcatctgaatggcatactgaggaggaatcgcttccccgaaggtcttaaaagacaatgggaatttcttcttttgctcacccaattcctccctccagctagagtaattcaaattcaacttccctttcctagactccaaaatcttattcatacccttcaacgcatacttgacatcag

SEQ ID NO: 1152 - DNA, 200 bp, Kochia scoparia
tgatgagctgaccaatggtaacgctattattagtactggtgttgggcaacatcaaatgtgggctgctcagcattacaagtacagaaaccctcgccaatggctgacctcaggtgggttgggtgccatgggttttggtctaccagccgccattggagctgctgtggctcgacctgatgcagtggtggttgatattgatggcg

SEQ ID NO: 1153 - DNA, 200 bp, Kochia scoparia
cgccatcaatatcaaccaccactgcatcaggtcgagccacagcagctccaatggcggctggtagaccaaaacccatggcacccaacccacctgaggtcagccattggcgagggtttctgtacttgtaatgctgagcagcccacatttgatgttgcccaacaccagtactaataatagcgttaccattggtcagctcatca

SEQ ID NO: 1154 - DNA, 200 bp, Kochia scoparia
gcagtggtggttgatattgatggcgatgggagtttcattatgaatgttcaagagttggctactattagggtggaaaatctccctgttaagataatgcttttgaataaccaacatttaggtatggtggttcaatgggaagataggttttataaagccaatagggcacatacttaccttggaaacccttcaaaagagtctga

SEQ ID NO: 1155 - DNA, 200 bp, Kochia scoparia
tcagactcttttgaagggtttccaaggtaagtatgtgccctattggctttataaaacctatcttcccattgaaccaccatacctaaatgttggttattcaaaagcattatcttaacagggagattttccaccctaatagtagccaactcttgaacattcataatgaaactcccatcgccatcaatatcaaccaccactgc

SEQ ID NO: 1156 - DNA, 200 bp, Kochia scoparia
ttggaaacccttcaaaagagtctgaaatcttcccggatatgcttaaatttgctgaggcgtgtgatattcctgctgctcgtgtcaccaaggttggagatttgagggcggccatgcagacaatgttggatactccgggaccttacctgcttgatgtgattgtacctcatcaggagcatgtgctgcctatgattcctagtggt

SEQ ID NO: 1157 - DNA, 200 bp, Kochia scoparia
accactaggaatcataggcagcacatgctcctgatgaggtacaatcacatcaagcaggtaaggtcccggagtatccaacattgtctgcatggccgccctcaaatctccaaccttggtgacacgagcagcaggaatatcacacgcctcagcaaatttaagcatatccgggaagatttcagactcttttgaagggtttccaa

SEQ ID NO: 1158 - DNA, 200 bp, Kochia scoparia
atggcgtctacttctgcaaatcccacttttacccctttcaccagtaaaccccttaaaccccgttctccctttcactctttcccatttccctcaaaccccaaaaccccttcctcttcatttcgcaacctcaaaatcacatcttctctctcttcttcacaacccccgaaaccaccttccgccgtcaaaatccactcaccacc

SEQ ID NO: 1159 - DNA, 200 bp, Kochia scoparia
ggtggtgagtggattttgacggcggaaggtggtttcgggggttgtgaagaagagagagaagatgtgattttgaggttgcgaaatgaagaggaaggggttttggggtttgagggaaatgggaaagagtgaaagggagaacggggtttaaggggtttactggtgaaaggggtaaaagtgggatttgcagaagtagacgccat

SEQ ID NO: 1160 - DNA, 200 bp, Kochia scoparia
ccgccgtcaaaatccactcaccaccttcccctctcacaaccgacgaacccccgcaaggttttgtttcccgatttgcccctgaccaacccagaaaaggctgcgatgtcctcgttgaggccctcgagcgggagggcgtcaccgacgtgttcgcttatcctggtggcgcatcaatggagattcatcaagctctgactcgctct

SEQ ID NO: 1161 - DNA, 200 bp, Kochia scoparia
agagcgagtcagagcttgatgaatctccattgatgcgccaccaggataagcgaacacgtcggtgacgccctcccgctcgagggcctcaacgaggacatcgcagccttttctgggttggtcaggggcaaatcgggaaacaaaaccttgcgggggttcgtcggttgtgagaggggaaggtggtgagtggattttgacggcgg

SEQ ID NO: 1162 - DNA, 200 bp, Kochia scoparia; identical to SEQ ID NO: 1140

SEQ ID NO: 1163 - DNA, 200 bp, Kochia scoparia; identical to SEQ ID NO: 1141

SEQ ID NO: 1164 - DNA, 200 bp, Kochia scoparia; identical to SEQ ID NO: 1142

SEQ ID NO: 1165 - DNA, 200 bp, Kochia scoparia; identical to SEQ ID NO: 1143

SEQ ID NO: 1166 - DNA, 200 bp, Kochia scoparia
ctaattctggtagacctggacctgttttgattgatattcctaaggatattcagcagcaattggttgtgcctgattggggtcagggggttaggttaggtgggtatgtgtctaggttgccgaaatcggagttttcggccaatgatgaggggcttcttgagcagattgtgaggttgatgagtgaggctaagaagcctgtgttg

SEQ ID NO: 1167 - DNA, 200 bp, Kochia scoparia
caacacaggcttcttagcctcactcatcaacctcacaatctgctcaagaagcccctcatcattggccgaaaactccgatttcggcaacctagacacatacccacctaacctaaccccctgaccccaatcaggcacaaccaattgctgctgaatatccttaggaatatcaatcaaaacaggtccaggtctaccagaattag

SEQ ID NO: 1168 - DNA, 200 bp, Kochia scoparia
gagtgaggctaagaagcctgtgttgtatgtgggaggcgggtgtttgaattctggggaggagttgaggaaattcgtcgagttgactgggattccggtggctagtactttaatgggtttgggcgcttatccctgtaatgatgacttgtctcttcatatgttgggtatgcatgggaccgtgtatgctaattatgctgttgata

SEQ ID NO: 1169 - DNA, 200 bp, Kochia scoparia
tatcaacagcataattagcatacacggtcccatgcatacccaacatatgaagagacaagtcatcattacagggataagcgcccaaacccattaaagtactagccaccggaatcccagtcaactcgacgaatttcctcaactcctccccagaattcaaacacccgcctcccacatacaacacaggcttcttagcctcactc

SEQ ID NO: 1170 - DNA, 200 bp, Kochia scoparia; identical to SEQ ID NO: 1148

SEQ ID NO: 1171 - DNA, 200 bp, Kochia scoparia; identical to SEQ ID NO: 1149

SEQ ID NO: 1172 - DNA, 200 bp, Kochia scoparia; identical to SEQ ID NO: 1150

SEQ ID NO: 1173 - DNA, 200 bp, Kochia scoparia; identical to SEQ ID NO: 1151

SEQ ID NO: 1174 - DNA, 200 bp, Kochia scoparia; identical to SEQ ID NO: 1152

SEQ ID NO: 1175 - DNA, 200 bp, Kochia scoparia; identical to SEQ ID NO: 1153

SEQ ID NO: 1176 - DNA, 200 bp, Kochia scoparia; identical to SEQ ID NO: 1154

SEQ ID NO: 1177 - DNA, 200 bp, Kochia scoparia; identical to SEQ ID NO: 1155

SEQ ID NO: 1178 - DNA, 200 bp, Kochia scoparia; identical to SEQ ID NO: 1156

SEQ ID NO: 1179 - DNA, 200 bp, Kochia scoparia; identical to SEQ ID NO: 1157

SEQ ID NO: 1180 - DNA, 200 bp, Lolium multiflorum
gccgccgccgccgccatggcaactgccacttcgacagccgtcgccttctcgggagccaccgccaccttgcccaaaccacgcactctcccgcgtcaccaactgccctcctcacgccgcgccctcgccgcccccatcaggtgctccgcggtgtccccatcgccctcgcccgcccctcccgccaccgcgctccgcccatgggg

SEQ ID NO: 1181 - DNA, 200 bp, Lolium multiflorum
ccccatgggcggagcgcggtggcgggaggggcgggcgagggcgatggggacaccgcggagcacctgatgggggcggcgagggcgcggcgtgaggagggcagttggtgacgcgggagagtgcgtggtttgggcaaggtggcggtggctcccgagaaggcgacggctgtcgaagtggcagttgccatggcggcggcggcggc

SEQ ID NO: 1182 - DNA, 200 bp, Lolium multiflorum
ccgccaccgcgctccgcccatggggcccatccgagccccgcaagggcgccgacatcctcgtcgaggccctcgagcgctgcggcatcagcgacgtcttcgcctacccgggcggcgcctcaatggagatccaccaggcgctcacgcgctcgccgctcatcaccaaccacctcttccgccacgagcagggcgaggccttcgcg

SEQ ID NO: 1183 - DNA, 200 bp, Lolium multiflorum
cgcgaaggcctcgccctgctcgtggcggaagaggtggttggtgatgagcggcgagcgcgtgagcgcctggtggatctccattgaggcgccgcccgggtaggcgaagacgtcgctgatgccgcagcgctcgagggcctcgacgaggatgtcggcgcccttgcggggctcggatgggccccatgggcggagcgcggtggcgg

SEQ ID NO: 1184 - DNA, 200 bp, Lolium multiflorum
ccacgagcagggcgaggccttcgcggcgtccgggtacgcgcgggcgtccggccgcgtcggggtctgcgtcgccacctccggcccgggggccaccaacctcgtctccgcgctcgccgacgccctcctcgactccatccccatggtggccatcacggggcaggtcccgcgccgcatgatcggcacggacgccttccaggaga

SEQ ID NO: 1185 - DNA, 200 bp, Lolium multiflorum
tctcctggaaggcgtccgtgccgatcatgcggcgcgggacctgccccgtgatggccaccatggggatggagtcgaggagggcgtcggcgagcgcggagacgaggttggtggcccccgggccggaggtggcgacgcagaccccgacgcggccggacgcccgcgcgtacccggacgccgcgaaggcctcgccctgctcgtgg

SEQ ID NO: 1186 - DNA, 200 bp, Lolium multiflorum
atcggcacggacgccttccaggagacgcccatcgtcgaggtcacccgctccatcaccaagcacaactacctcgtcctcgacgtcgaggacatcccccgcgtcatccaggaagccttcttcctcgcctcctctggccgcccgggcccggtgctcgtcgacatccccaaggacatccagcagcagatggctgtgcccgtctg

SEQ ID NO: 1187 - DNA, 200 bp, Lolium multiflorum
cagacgggcacagccatctgctgctggatgtccttggggatgtcgacgagcaccgggcccgggcggccagaggaggcgaggaagaaggcttcctggatgacgcgggggatgtcctcgacgtcgaggacgaggtagttgtgcttggtgatggagcgggtgacctcgacgatgggcgtctcctggaaggcgtccgtgccgat

SEQ ID NO: 1188 - DNA, 200 bp, Lolium multiflorum
agcagcagatggctgtgcccgtctgggacgcgcccatgagtctgccaggctacattgcccgcctgcctaagccgccggctactgaattgctcgagcaggtcctgcgtctggttggcgaggcgagacgcccgattctctatgttggcggtggctgctctgcgtccggggaggagctgcgccgctttgttgagctcactggg

SEQ ID NO: 1189 - DNA, 200 bp, Lolium multiflorum
cccagtgagctcaacaaagcggcgcagctcctccccggacgcagagcagccaccgccaacatagagaatcgggcgtctcgcctcgccaaccagacgcaggacctgctcgagcaattcagtagccggcggcttaggcaggcgggcaatgtagcctggcagactcatgggcgcgtcccagacgggcacagccatctgctgct

SEQ ID NO: 1190 - DNA, 200 bp, Lolium multiflorum
gcgccgctttgttgagctcactgggatccctgttacaactaccctcatgggtcttggcaacttccccagcgacgacccgctgtctctgcgtatgcttgggatgcatggcactgtgtacgcaaactacgccgtagataaggctgacctgttgcttgcatttggcgtgaggtttgatgatcgcgtgactgggaaaatcgagg

SEQ ID NO: 1191 - DNA, 200 bp, Lolium multiflorum
cctcgattttcccagtcacgcgatcatcaaacctcacgccaaatgcaagcaacaggtcagccttatctacggcgtagtttgcgtacacagtgccatgcatcccaagcatacgcagagacagcgggtcgtcgctggggaagttgccaagacccatgagggtagttgtaacagggatcccagtgagctcaacaaagcggcgc

SEQ ID NO: 1192 - DNA, 200 bp, Lolium multiflorum
gatcgcgtgactgggaaaatcgaggcttttgcaagcaggtccaagattgtgcacattgacattgatccagctgagattggcaagaacaagcagccgcatgtctccatttgcgcagatgtcaagctcgctttgcagggcctgaatgctctgctaactgggagcaaagcacacaagagtttcgattttgcttcgtggcatga

SEQ ID NO: 1193 - DNA, 200 bp, Lolium multiflorum
tcatgccacgaagcaaaatcgaaactcttgtgtgctttgctcccagttagcagagcattcaggccctgcaaagcgagcttgacatctgcgcaaatggagacatgcggctgcttgttcttgccaatctcagctggatcaatgtcaatgtgcacaatcttggacctgcttgcaaaagcctcgattttcccagtcacgcgatc

SEQ ID NO: 1194 - DNA, 200 bp, Lolium multiflorum
gtttcgattttgcttcgtggcatgacgagttggagcagcagaaaagggagtttcctctgggatacaaaactttcggggaggccatcccaccgcaatatgctatccaggtactggatgagctcaccaaaggtgaggccatcattgccactggtgttgggcagcaccagatgtgggcggctcagtattacacctacaagcgc

SEQ ID NO: 1195 - DNA, 200 bp, Lolium multiflorum
gcgcttgtaggtgtaatactgagccgcccacatctggtgctgcccaacaccagtggcaatgatggcctcacctttggtgagctcatccagtacctggatagcatattgcggtgggatggcctccccgaaagttttgtatcccagaggaaactcccttttctgctgctccaactcgtcatgccacgaagcaaaatcgaaac

SEQ ID NO: 1196 - DNA, 200 bp, Lolium multiflorum
ggctcagtattacacctacaagcgcccacggcagtggctgtcttcggctggtctgggggcaatggggtttgggttgccagctgcagctggcgccgctgtggctaacccaggtgtcacagttgttgacattgatggggatggtagcttcctcatgaacattcaggagttggcgctgattcgcattgagaacctcccagtta

SEQ ID NO: 1197 - DNA, 200 bp, Lolium multiflorum
taactgggaggttctcaatgcgaatcagcgccaactcctgaatgttcatgaggaagctaccatccccatcaatgtcaacaactgtgacacctgggttagccacagcggcgccagctgcagctggcaacccaaaccccattgcccccagaccagccgaagacagccactgccgtgggcgcttgtaggtgtaatactgagcc

SEQ ID NO: 1198 - DNA, 200 bp, Lolium multiflorum
attcgcattgagaacctcccagttaaggtgatgatattgaacaaccagcatcttggaatggtggtgcagtgggaggacaggttttacaaggccaatcgggcgcatacataccttgggaacccagaaaatgagagtgagatatatccagattttgtgaccattgctaaaggcttcaatgttcctgcagttcgtgtgacaaa

SEQ ID NO: 1199 - DNA, 200 bp, Lolium multiflorum
tttgtcacacgaactgcaggaacattgaagcctttagcaatggtcacaaaatctggatatatctcactctcattttctgggttcccaaggtatgtatgcgcccgattggccttgtaaaacctgtcctcccactgcaccaccattccaagatgctggttgttcaatatcatcaccttaactgggaggttctcaatgcgaat

SEQ ID NO: 1200 - DNA, 200 bp, Lolium multiflorum
atgttcctgcagttcgtgtgacaaagaggagtgaagtccgtgcagcgatcaagaagatgcttgagactcctgggccatacttgttggatatcatcgtccctcaccaggagcatgtgctgcctatgatccctagcggtggtgctttcaaggacattatcatggaaggtgatggcaggattgcgtattaatcgcaacttctg

SEQ ID NO: 1201 - DNA, 200 bp, Lolium multiflorum
cagaagttgcgattaatacgcaatcctgccatcaccttccatgataatgtccttgaaagcaccaccgctagggatcataggcagcacatgctcctggtgagggacgatgatatccaacaagtatggcccaggagtctcaagcatcttcttgatcgctgcacggacttcactcctctttgtcacacgaactgcaggaacat

SEQ ID NO: 1202 - DNA, 200 bp, Lolium multiflorum
gattgcgtattaatcgcaacttctgcaagagctccacctacaagacctacaagtgcaatatgcctgatcagcatgatgctggtgtatgttatatccatgtgttcgctaatttgcttgtttgatgagcttggtttgctagtcttacctagctctgaaccttctaggttttctagtctgttcttttccgtaggcatatgctg

SEQ ID NO: 1203 - DNA, 200 bp, Lolium multiflorum
cagcatatgcctacggaaaagaacagactagaaaacctagaaggttcagagctaggtaagactagcaaaccaagctcatcaaacaagcaaattagcgaacacatggatataacatacaccagcatcatgctgatcaggcatattgcacttgtaggtcttgtaggtggagctcttgcagaagttgcgattaatacgcaatc

SEQ ID NO: 1204 - DNA, 200 bp, Lolium multiflorum
ggcccaacactgtctacaggaatagaagcgtgcgtagacatcactaggatttattgaatacattcatgctatattgttgctgcctagtctttcgttcattgcatatttattcagatcaataattttgtggaaatattaatcctcttcattatgaatcaagatttgatatcaatttctgctcatgcttactttatttccaa

SEQ ID NO: 1205 - DNA, 200 bp, Lolium multiflorum
ttggaaataaagtaagcatgagcagaaattgatatcaaatcttgattcataatgaagaggattaatatttccacaaaattattgatctgaataaatatgcaatgaacgaaagactaggcagcaacaatatagcatgaatgtattcaataaatcctagtgatgtctacgcacgcttctattcctgtagacagtgttgggcc

SEQ ID NO: 1206 - DNA, 200 bp, Lolium multiflorum
ctgctcatgcttactttatttccaagtgggaaaaattcacgtagttgtaggtcactagatgtttttgggtatccatttggatgagctgcatgtggatctatcagaagcatcgctaggttggttttggtgtctgtctgagaggaggtttgtctcaccttctcctaaacttgataacttgtttgctgcctgtgtggattgga

SEQ ID NO: 1207 - DNA, 200 bp, Lolium multiflorum
tccaatccacacaggcagcaaacaagttatcaagtttaggagaaggtgagacaaacctcctctcagacagacaccaaaaccaacctagcgatgcttctgatagatccacatgcagctcatccaaatggatacccaaaaacatctagtgacctacaactacgtgaatttttcccacttggaaataaagtaagcatgagcag

SEQ ID NO: 1208 - DNA, 200 bp, Lolium multiflorum
ttgtttgctgcctgtgtggattggaattttatagaaattttggttccgggaaatgtcaatcacattgttctctgactgtttatgtatggtttgggttgctgatgtctgcttcccttctggaacaggctttggttggacctcggatcgagcttatgttagactttgacccaagatatgatgacaaacttatatgtgttgtt

SEQ ID NO: 1209 - DNA, 200 bp, Lolium multiflorum
aacaacacatataagtttgtcatcatatcttgggtcaaagtctaacataagctcgatccgaggtccaaccaaagcctgttccagaagggaagcagacatcagcaacccaaaccatacataaacagtcagagaacaatgtgattgacatttcccggaaccaaaatttctataaaattccaatccacacaggcagcaaacaa

SEQ ID NO: 1210 - DNA, 200 bp, Lolium multiflorum
tgatgacaaacttatatgtgttgttgcttcaaatgtccttcatttgttattagtggattagggaaaaactttctggtagcaaaccaagttggctatagtgtttattgatttgttagcttgttccatgcctgtctgtatccccttcctcgtttgtggcgcatgagtatttgctgctgtctggaggcaattattatatcaag

SEQ ID NO: 1211 - DNA, 200 bp, Lolium multiflorum
cttgatataataattgcctccagacagcagcaaatactcatgcgccacaaacgaggaaggggatacagacaggcatggaacaagctaacaaatcaataaacactatagccaacttggtttgctaccagaaagtttttccctaatccactaataacaaatgaaggacatttgaagcaacaacacatataagtttgtcatca

SEQ ID NO: 1212 - DNA, 200 bp, Lolium multiflorum
gtctggaggcaattattatatcaagtatgcaaggtacttaattaatttagtactactctaggtttgtatcaaacctgacacaacgtgtattagttcaacaatgtgtatatgctttcctagggtccttttactgattactacaacagtgtgtgcttgctgtctagatgccaggcataggaagtcaatggttgctttacacc

SEQ ID NO: 1213 - DNA, 200 bp, Lolium multiflorum
ggtgtaaagcaaccattgacttcctatgcctggcatctagacagcaagcacacactgttgtagtaatcagtaaaaggaccctaggaaagcatatacacattgttgaactaatacacgttgtgtcaggtttgatacaaacctagagtagtactaaattaattaagtaccttgcatacttgatataataattgcctccagac

SEQ ID NO: 1214 - DNA, 200 bp, Lolium multiflorum
aggaagtcaatggttgctttacaccatcttggagtactaatttttcaactagactgaattttctcgcagtagagtaacttcctgatggcaatggtaagtggttgcatatcagagatacgctgctgctagagtaggcgaggtgtgcttcttggaactggctaggtgcgagctcgtgagatgctgttgagcctaaagcaatg

SEQ ID NO: 1215 - DNA, 200 bp, Lolium multiflorum
cattgctttaggctcaacagcatctcacgagctcgcacctagccagttccaagaagcacacctcgcctactctagcagcagcgtatctctgatatgcaaccacttaccattgccatcaggaagttactctactgcgagaaaattcagtctagttgaaaaattagtactccaagatggtgtaaagcaaccattgacttcct

SEQ ID NO: 1216 - DNA, 200 bp, Lolium multiflorum
agatgctgttgagcctaaagcaatgatgccttctctggattaggtaagtctttggtctatctcattctcctctttgttattttgagtcaagtacctatgtgatatggaatatatggtatgaattgctctgtgttagggtctaatcaagtcactatgatgttactttatggttaattatgtatgcgttgctttcttttcga

SEQ ID NO: 1217 - DNA, 200 bp, Lolium multiflorum
tcgaaaagaaagcaacgcatacataattaaccataaagtaacatcatagtgacttgattagaccctaacacagagcaattcataccatatattccatatcacataggtacttgactcaaaataacaaagaggagaatgagatagaccaaagacttacctaatccagagaaggcatcattgctttaggctcaacagcatct

SEQ ID NO: 1218 - DNA, 200 bp, Lolium multiflorum
tatgtatgcgttgctttcttttcgagttatgatgtaagtgataagtcatagtcataatgatctccataaaatggaaatattatactccagttatctattttcgaatttattggttgcatgatgttccaggggtagcatctacatgactagcactcttttatttgactttaggccatgctctcatttctcttgcagtagat

SEQ ID NO: 1219 - DNA, 200 bp, Lolium multiflorum
atctactgcaagagaaatgagagcatggcctaaagtcaaataaaagagtgctagtcatgtagatgctacccctggaacatcatgcaaccaataaattcgaaaatagataactggagtataatatttccattttatggagatcattatgactatgacttatcacttacatcataactcgaaaagaaagcaacgcatacata

SEQ ID NO: 1220 - DNA, 200 bp, Lolium multiflorum
tgctctcatttctcttgcagtagatagaggcacaaatctattacagtctgatgcatatttttctttggaagcatgaatgttttgtgaatcgtgaaactgttattttggccagtccctgattcttgaatggtttttattattggcttgaccagttaagtatgtacttgtgcactaattttcctctgcattgttgtagtcat

SEQ ID NO: 1221 - DNA, 200 bp, Lolium multiflorum
atgactacaacaatgcagaggaaaattagtgcacaagtacatacttaactggtcaagccaataataaaaaccattcaagaatcagggactggccaaaataacagtttcacgattcacaaaacattcatgcttccaaagaaaaatatgcatcagactgtaatagatttgtgcctctatctactgcaagagaaatgagagca

SEQ ID NO: 1222 - DNA, 200 bp, Lolium multiflorum
ttttcctctgcattgttgtagtcatgcaagatagatggatgagcatacggcggagtcttgttcttggaccggtggtggttggtagctggatgttgtgacgcgttgctagagggagcggtgcacacggggacaagttggtgggttgccatagtgttggtggacaggagagctcctgatcatgcaactacaagaaggggact

SEQ ID NO: 1223 - DNA, 200 bp, Lolium multiflorum
agtccccttcttgtagttgcatgatcaggagctctcctgtccaccaacactatggcaacccaccaacttgtccccgtgtgcaccgctccctctagcaacgcgtcacaacatccagctaccaaccaccaccggtccaagaacaagactccgccgtatgctcatccatctatcttgcatgactacaacaatgcagaggaaaa

SEQ ID NO: 1224 - DNA, 200 bp, Lolium multiflorum
atcatgcaactacaagaaggggacttgtaggcatatatgcctggaggttgggagctgtttccagccagaaggaccgataatggatgttgctgctgtagggtgggtttacattctgggctagctttatttgcatccctgtgtcgttcttgtatttgtggtttgaaccgtggattacttatgtctccttcaaagaatttcat

SEQ ID NO: 1225 - DNA, 200 bp, Lolium multiflorum
atgaaattctttgaaggagacataagtaatccacggttcaaaccacaaatacaagaacgacacagggatgcaaataaagctagcccagaatgtaaacccaccctacagcagcaacatccattatcggtccttctggctggaaacagctcccaacctccaggcatatatgcctacaagtccccttcttgtagttgcatgat

SEQ ID NO: 1226 - DNA, 200 bp, Lolium multiflorum
ttatgtctccttcaaagaatttcatgtctttgttgtttccgattgaattatattttgtttaattttgtcaaactgttagaaaataaaaacttacaaatgggaagaaaaaatagatcgcaaaaagactaaggccctaaaaaatgtataggttgttaattgattaaggcccgaaaggttaatcagctaacaaagatgaagcc

SEQ ID NO: 1227 - DNA, 200 bp, Lolium multiflorum
ggcttcatctttgttagctgattaacctttcgggccttaatcaattaacaacctatacattttttagggccttagtctttttgcgatctattttttcttcccatttgtaagtttttattttctaacagtttgacaaaattaaacaaaatataattcaatcggaaacaacaaagacatgaaattctttgaaggagacataa

SEQ ID NO: 1228 - DNA, 200 bp, Lolium multiflorum
ttaatcagctaacaaagatgaagcccagaagataaatggaccgaacaatggctgcaaaaatacaaaggctcaaaatttaaatggatcggaaaagaccaaggcctagaataaaaagtctggtattaatgggctcggcctatgcaatccaccgaaatggatcgggctgattttggattacgacgattagatttcgtcataat

SEQ ID NO: 1229 - DNA, 200 bp, Lolium multiflorum
attatgacgaaatctaatcgtcgtaatccaaaatcagcccgatccatttcggtggattgcataggccgagcccattaataccagactttttattctaggccttggtcttttccgatccatttaaattttgagcctttgtatttttgcagccattgttcggtccatttatcttctgggcttcatctttgttagctgattaa

SEQ ID NO: 1230 - DNA, 200 bp, Lolium multiflorum
tacgacgattagatttcgtcataattttgccatgttagactagccacgtaggatctgatgtggcatggccaaatctccagtgacgatattggatcgtcatagtggttacgacgatccaatatcatgatagacgactatgacgattcaaagtaaaaggtcatgttggttgatttttgacgctccgtttttgacgatccatt

SEQ ID NO: 1231 - DNA, 200 bp, Lolium multiflorum
aatggatcgtcaaaaacggagcgtcaaaaatcaaccaacatgaccttttactttgaatcgtcatagtcgtctatcatgatattggatcgtcgtaaccactatgacgatccaatatcgtcactggagatttggccatgccacatcagatcctacgtggctagtctaacatggcaaaattatgacgaaatctaatcgtcgta

SEQ ID NO: 1232 - DNA, 200 bp, Lolium multiflorum
gacgctccgtttttgacgatccattttttgtcatagaatcgtcatagatgaaatattatgacgatttagagacgaaaatggagtgtcgtaggtcaacatatttcttgtagtggagagagtcctcagttagttctatctaacttggagaattccgatgacgtcttcaccagcccgacaccaccaaagccggccttcttgcc

SEQ ID NO: 1233 - DNA, 200 bp, Lolium multiflorum
ggcaagaaggccggctttggtggtgtcgggctggtgaagacgtcatcggaattctccaagttagatagaactaactgaggactctctccactacaagaaatatgttgacctacgacactccattttcgtctctaaatcgtcataatatttcatctatgacgattctatgacaaaaaatggatcgtcaaaaacggagcgtc

SEQ ID NO: 1234 - DNA, 200 bp, Lolium multiflorum
caccaccaaagccggccttcttgccaccactcatctttctttcggtttgtgtcttgttcgtgtgcgggtctcgcgctaggatccgactccaagtaagagcatctccaacaggcgcactaaattttggcgcgctaaacgtcgcttccgccacgctgtaaacatatagcacgcgctgcgctgaaatttgccccaccggatgc

SEQ ID NO: 1235 - DNA, 200 bp, Lolium multiflorum
gcatccggtggggcaaatttcagcgcagcgcgtgctatatgtttacagcgtggcggaagcgacgtttagcgcgccaaaatttagtgcgcctgttggagatgctcttacttggagtcggatcctagcgcgagacccgcacacgaacaagacacaaaccgaaagaaagatgagtggtggcaagaaggccggctttggtggtg

SEQ ID NO: 1236 - DNA, 200 bp, Lolium multiflorum
cgctgaaatttgccccaccggatgctctattttgcagcgcgtgttggcgcggtaaaaaagctcctccgtcgggtgcgccaaaaatacaacgcgcgcgggcgcggcaaaatacagcgcgcgcgcagcaaacaactttctacactactatgcattcaacaagatcaaacactcacatataaatcatgaaacaaatgatctac

SEQ ID NO: 1237 - DNA, 200 bp, Lolium multiflorum
gtagatcatttgtttcatgatttatatgtgagtgtttgatcttgttgaatgcatagtagtgtagaaagttgtttgctgcgcgcgcgctgtattttgccgcgcccgcgcgcgttgtatttttggcgcacccgacggaggagcttttttaccgcgccaacacgcgctgcaaaatagagcatccggtggggcaaatttcagcg

SEQ ID NO: 1238 - DNA, 200 bp, Lolium multiflorum
ataaatcatgaaacaaatgatctactatagttcaaatggacacaaagtgcaacacacatgacatagttcaagaacgacacacaacatgacgtagttcaacaacgacacacaacatatggttcaaatggacacaaagtgcaacacacaatttgcatatcacaaatgcatctcacacttccgcattttccaagtcatcacct

SEQ ID NO: 1239 - DNA, 200 bp, Lolium multiflorum
aggtgatgacttggaaaatgcggaagtgtgagatgcatttgtgatatgcaaattgtgtgttgcactttgtgtccatttgaaccatatgttgtgtgtcgttgttgaactacgtcatgttgtgtgtcgttcttgaactatgtcatgtgtgttgcactttgtgtccatttgaactatagtagatcatttgtttcatgatttat

SEQ ID NO: 1240 - DNA, 200 bp, Lolium multiflorum
ttccgcattttccaagtcatcaccttattttgcttcttcttcctcgtcatcttgggttgaaggaggaatagtaggatccatggaggccacgaatcctcccggtggcgctcccgtagtcccatacacaccacgcaccgagcctcccatagtccctttgaagactcctccataacttggttctcccatgccggccatgcctc

SEQ ID NO: 1241 - DNA, 200 bp, Lolium multiflorum
gaggcatggccggcatgggagaaccaagttatggaggagtcttcaaagggactatgggaggctcggtgcgtggtgtgtatgggactacgggagcgccaccgggaggattcgtggcctccatggatcctactattcctccttcaacccaagatgacgaggaagaagaagcaaaataaggtgatgacttggaaaatgcggaa

SEQ ID NO: 1242 - DNA, 200 bp, Lolium multiflorum
ggttctcccatgccggccatgcctccaaagcctcccatgccggccatgcctcccatgccggccatgcctcccatacttcctccaaatatgggcatgcctcctccaaacatgccggtcgtgggtgtgttcatgttggctaccaacaatctcttcttggccaacacttcgtcgcgagcaaggttgatgtactacttttgcct

SEQ ID NO: 1243 - DNA, 200 bp, Lolium multiflorum
aggcaaaagtagtacatcaaccttgctcgcgacgaagtgttggccaagaagagattgttggtagccaacatgaacacacccacgaccggcatgtttggaggaggcatgcccatatttggaggaagtatgggaggcatggccggcatgggaggcatggccggcatgggaggctttggaggcatggccggcatgggagaacc

SEQ ID NO: 1244 - DNA, 200 bp, Lolium multiflorum
caaggttgatgtactacttttgcctctcatccatgtgggaagtatccatcaagaaaagcttcctctcctcctccactaggcgtagatgctcctcgttggcttgcctcttctcctccaaatccaacttcctctcctcgttggcggcaagcctctcctccaaagcggctctccgagcttccattgcatccatagcctctttc

SEQ ID NO: 1245 - DNA, 200 bp, Lolium multiflorum
gaaagaggctatggatgcaatggaagctcggagagccgctttggaggagaggcttgccgccaacgaggagaggaagttggatttggaggagaagaggcaagccaacgaggagcatctacgcctagtggaggaggagaggaagcttttcttgatggatacttcccacatggatgagaggcaaaagtagtacatcaaccttg

SEQ ID NO: 1246 - DNA, 200 bp, Lolium multiflorum
ttccattgcatccatagcctctttctccaagttccttgccaccttcctatcttcatttgcttgcaaccttgcatttgcaatcctttccatagcaatgacaatgtcatcatctccggccttctttcccttcatatctttggcggtcttcctaccaagcacattcctccgcccattattgaccgagtgacgagtggagcgtc

SEQ ID NO: 1247 - DNA, 200 bp, Lolium multiflorum
gacgctccactcgtcactcggtcaataatgggcggaggaatgtgcttggtaggaagaccgccaaagatatgaagggaaagaaggccggagatgatgacattgtcattgctatggaaaggattgcaaatgcaaggttgcaagcaaatgaagataggaaggtggcaaggaacttggagaaagaggctatggatgcaatggaa

SEQ ID NO: 1248 - DNA, 200 bp, Lolium multiflorum
ttgaccgagtgacgagtggagcgtctcttcttgccttggtcacttgaatcatcatcatcgatgattgttgcatcaccggttgcattggctgccatagttgccacattcaacttcccgcgggtcttcatcttttcttcattccctagcacttcatagcaacgatgcaaggtgaatggcttgccaagattcttgttgccttt

SEQ ID NO: 1249 - DNA, 200 bp, Lolium multiflorum
aaaggcaacaagaatcttggcaagccattcaccttgcatcgttgctatgaagtgctagggaatgaagaaaagatgaagacccgcgggaagttgaatgtggcaactatggcagccaatgcaaccggtgatgcaacaatcatcgatgatgatgattcaagtgaccaaggcaagaagagacgctccactcgtcactcggtcaa

SEQ ID NO: 1250 - DNA, 200 bp, Lolium multiflorum
gcttgccaagattcttgttgcctttcttgttcttctttcccacatccccaaacaatccttgagccatatagttctacaaagcaagcaaaagagaatatatgagctatatgaactacaacctcgtatccttcacatatgagccatatggtcaacatagtagtagaattgcttaccctatcaatctcatttgtgccacttgg

SEQ ID NO: 1251 - DNA, 200 bp, Lolium multiflorum
ccaagtggcacaaatgagattgatagggtaagcaattctactactatgttgaccatatggctcatatgtgaaggatacgaggttgtagttcatatagctcatatattctcttttgcttgctttgtagaactatatggctcaaggattgtttggggatgtgggaaagaagaacaagaaaggcaacaagaatcttggcaagc

SEQ ID NO: 1252 - DNA, 200 bp, Lolium multiflorum
tatcaatctcatttgtgccacttgggttaatgacatcaacgttggcttgcatgcccgcccatttttggcaatcggtgttgatgccggaccaacgagaccgaagagaacgcatggttcgctcgttcccacttgtgttgttggcgtcgaggtactccttcatcctcatccagtatgtgtatcttgtttgatcggcaccggtt

SEQ ID NO: 1253 - DNA, 200 bp, Lolium multiflorum
aaccggtgccgatcaaacaagatacacatactggatgaggatgaaggagtacctcgacgccaacaacacaagtgggaacgagcgaaccatgcgttctcttcggtctcgttggtccggcatcaacaccgattgccaaaaatgggcgggcatgcaagccaacgttgatgtcattaacccaagtggcacaaatgagattgata

SEQ ID NO: 1254 - DNA, 200 bp, Lolium multiflorum
gtatcttgtttgatcggcaccggttgttggatccattccaattgtcaaccatgtattgcaaagcaacttgtcctccgctatggtgtagttcgccgaccgaccgggatggcgaggttcaatcaacccttctccttcctcatcgatatcctcatattcctcccatcccttaatggtttcatcatgcataaacgaagatccaa

SEQ ID NO: 1255 - DNA, 200 bp, Lolium multiflorum
ttggatcttcgtttatgcatgatgaaaccattaagggatgggaggaatatgaggatatcgatgaggaaggagaagggttgattgaacctcgccatcccggtcggtcggcgaactacaccatagcggaggacaagttgctttgcaatacatggttgacaattggaatggatccaacaaccggtgccgatcaaacaagatac

SEQ ID NO: 1256 - DNA, 200 bp, Lolium multiflorum
tcatcatgcataaacgaagatccaacattcattgcctccatgaaagactcatcatcgactctacattgcaatgaagttcattattctgtggctatgtatgcatctaaactaaaatttggatgaaaagaagtgttttttacctctccggcattttctcatacaccgtatgtgcgccggacggaggcgccagcggcggctgg

SEQ ID NO: 1257 - DNA, 200 bp, Lolium multiflorum
ccagccgccgctggcgcctccgtccggcgcacatacggtgtatgagaaaatgccggagaggtaaaaaacacttcttttcatccaaattttagtttagatgcatacatagccacagaataatgaacttcattgcaatgtagagtcgatgatgagtctttcatggaggcaatgaatgttggatcttcgtttatgcatgatga

SEQ ID NO: 1258 - DNA, 200 bp, Lolium multiflorum
ggacggaggcgccagcggcggctggttcgtcggtggaggaggcggcggaggctgcgcgcggcgggtcgcggtcgccttcactttcttcggcggcgcaagggaggcgacgtccgcagctacatacgagcgtttggacgacgacgccttcctcctcggcggctcccgcgccttgccgggggccatcacagtggccagctgcg

SEQ ID NO: 1259 - DNA, 200 bp, Lolium multiflorum
cgcagctggccactgtgatggcccccggcaaggcgcgggagccgccgaggaggaaggcgtcgtcgtccaaacgctcgtatgtagctgcggacgtcgcctcccttgcgccgccgaagaaagtgaaggcgaccgcgacccgccgcgcgcagcctccgccgcctcctccaccgacgaaccagccgccgctggcgcctccgtcc

SEQ ID NO: 1260 - DNA, 200 bp, Lolium multiflorum
ggggccatcacagtggccagctgcgcaacggcggctgtgtgcagcgtcgcgcgcagcgggacgaagagagcacgggcatcagcggttgtgttgccggcgtcggtgccaccgctagggtttggcgcatggggcggcggcgcgacagaggcggcagcggtgggtggaatggagtatggaggggtcggtggggtgccgacggg

SEQ ID NO: 1261 - DNA, 200 bp, Lolium multiflorum
cccgtcggcaccccaccgacccctccatactccattccacccaccgctgccgcctctgtcgcgccgccgccccatgcgccaaaccctagcggtggcaccgacgccggcaacacaaccgctgatgcccgtgctctcttcgtcccgctgcgcgcgacgctgcacacagccgccgttgcgcagctggccactgtgatggcccc

SEQ ID NO: 1262 - DNA, 200 bp, Lolium multiflorum
gaggggtcggtggggtgccgacgggaccgtccatcgccgggattgtgtcgacggccgcgcggaggcgagggattgggcggtgcggtggcgaggcgcggggggaagtttcagcgcgggatttgttcgcgtgcgtcgagcgatgacgcgtgctgtagccggcgtccaaagtttagcgcttgggatagggcaaaccggtccgc

SEQ ID NO: 1263 - DNA, 200 bp, Lolium multiflorum
gcggaccggtttgccctatcccaagcgctaaactttggacgccggctacagcacgcgtcatcgctcgacgcacgcgaacaaatcccgcgctgaaacttccccccgcgcctcgccaccgcaccgcccaatccctcgcctccgcgcggccgtcgacacaatcccggcgatggacggtcccgtcggcaccccaccgacccctc

SEQ ID NO: 1264 - DNA, 200 bp, Lolium multiflorum
cttgggatagggcaaaccggtccgcgtcccaaatttttttttacagcgttgtagcatctgccggaggaccaattttgcgctctcgcgctggaaacgacggtttatatagggcgcaacatatatagcgcgtgttgaagatgctctaagactgctcatagtgggagtaacattgctcgtaacgtcacacatctcaaggtgtt

SEQ ID NO: 1265 - DNA, 200 bp, Lolium multiflorum
aacaccttgagatgtgtgacgttacgagcaatgttactcccactatgagcagtcttagagcatcttcaacacgcgctatatatgttgcgccctatataaaccgtcgtttccagcgcgagagcgcaaaattggtcctccggcagatgctacaacgctgtaaaaaaaaatttgggacgcggaccggtttgccctatcccaag

SEQ ID NO: 1266 - DNA, 200 bp, Lolium multiflorum
ctatgatagagtttggctctggtggttaggtcccttgtggtggaaccagcccacccaggttcaagtcctagatttggtatggatgtttgcatttacctggatttatttcagaatttaatcggcgctatactttcagtggtaggtgatgtgcccgtcaatagcgaggcgccagtggtgacttcgtcaacctcaagatatgg

SEQ ID NO: 1267 - DNA, 200 bp, Lolium multiflorum
ccatatcttgaggttgacgaagtcaccactggcgcctcgctattgacgggcacatcacctaccactgaaagtatagcgccgattaaattctgaaataaatccaggtaaatgcaaacatccataccaaatctaggacttgaacctgggtgggctggttccaccacaagggacctaaccaccagagccaaactctatcatag

SEQ ID NO: 1268 - DNA, 200 bp, Lolium multiflorum
tgacttcgtcaacctcaagatatggtggctcagtccctcgaaggtgctcataggagtagggtatgcgtgcgtgcgttcgtacggtgtttgtacgtgcgtatttgtgagttctcgtctgccttatactgtgttctaaaaaaaattcagtttttatcttgcctcgagagccgacttccaatctggacccgttataggtggac

SEQ ID NO: 1269 - DNA, 200 bp, Lolium multiflorum
gtccacctataacgggtccagattggaagtcggctctcgaggcaagataaaaactgaattttttttagaacacagtataaggcagacgagaactcacaaatacgcacgtacaaacaccgtacgaacgcacgcacgcataccctactcctatgagcaccttcgagggactgagccaccatatcttgaggttgacgaagtca

SEQ ID NO: 1270 - DNA, 200 bp, Lolium multiflorum
caatctggacccgttataggtggaccctacgtgtcaatgccaacacggctttgattcacgcgccgctgcaatcttcattgtatatccttctatataccgacgcaggttgttcaaaaagaaaataccgacgcaggtggtgaacagcctagcaaattgtcaccgacagatgggtccaaaccaggataaggcccacatgtcat

SEQ ID NO: 1271 - DNA, 200 bp, Lolium multiflorum
atgacatgtgggccttatcctggtttggacccatctgtcggtgacaatttgctaggctgttcaccacctgcgtcggtattttctttttgaacaacctgcgtcggtatatagaaggatatacaatgaagattgcagcggcgcgtgaatcaaagccgtgttggcattgacacgtagggtccacctataacgggtccagattg

SEQ ID NO: 1272 - DNA, 200 bp, Lolium multiflorum
aaccaggataaggcccacatgtcattgcgtgtagtggcataaccgggttggcccaccccacccccagccccatcccatctgaaccacacatcttgccacgccacgcgactgcaccaaagacaaaacacgctcgcaccaccactccatcctcctctttctccctcgcccaaaccctcgccgccgccttcgcgacatccgcc

SEQ ID NO: 1273 - DNA, 200 bp, Lolium multiflorum
ggcggatgtcgcgaaggcggcggcgagggtttgggcgagggagaaagaggaggatggagtggtggtgcgagcgtgttttgtctttggtgcagtcgcgtggcgtggcaagatgtgtggttcagatgggatggggctgggggtggggtgggccaacccggttatgccactacacgcaatgacatgtgggccttatcctggtt

SEQ ID NO: 1274 - DNA, 200 bp, Lolium multiflorum
cgccgccgccttcgcgacatccgccgccgccatggccactgccacttccacagccgtcgccttctcgggtgccaccgccgccttgcccaaaccacgcactctccggcgttaccaactgctctcctcacgccgcgccctcaccgcccccatcaggtgctccgcggtgtccccttcgccttcgcccgcccctcccgccaccg

SEQ ID NO: 1275 - DNA, 200 bp, Lolium multiflorum
cggtggcgggaggggcgggcgaaggcgaaggggacaccgcggagcacctgatgggggcggtgagggcgcggcgtgaggagagcagttggtaacgccggagagtgcgtggtttgggcaaggcggcggtggcacccgagaaggcgacggctgtggaagtggcagtggccatggcggcggcggatgtcgcgaaggcggcggcg

SEQ ID NO: 1276 - DNA, 200 bp, Lolium multiflorum
ccttcgcccgcccctcccgccaccgcgctccgtccatggggcccatccgagccccgcaagggcgccgacatcctcgtcgaggccctcgagcgctgcggcatcagcgacgtcttcgcctacccgggcggcgcctcaatggagatccaccaggcgctcacgcgctcgccgctcatcaccaaccacctcttccgccacgagca

SEQ ID NO: 1277 - DNA, 200 bp, Lolium multiflorum
tgctcgtggcggaagaggtggttggtgatgagcggcgagcgcgtgagcgcctggtggatctccattgaggcgccgcccgggtaggcgaagacgtcgctgatgccgcagcgctcgagggcctcgacgaggatgtcggcgcccttgcggggctcggatgggccccatggacggagcgcggtggcgggaggggcgggcgaagg

SEQ ID NO: 1278 - DNA, 200 bp, Lolium multiflorum
ccaaccacctcttccgccacgagcagggggaggccttcgcggcgtccgggtacgcgcgcgcgtccggccgcgtcggggtctgcgtcgccacctccggcccgggggccaccaacctcgtctccgcgctcgccgacgccctcctcgactccatcccgatggtggccatcacggggcaggtcccgcgccgcatgatcggcacg

SEQ ID NO: 1279 - DNA, 200 bp, Lolium multiflorum
cgtgccgatcatgcggcgcgggacctgccccgtgatggccaccatcgggatggagtcgaggagggcgtcggcgagcgcggagacgaggttggtggcccccgggccggaggtggcgacgcagaccccgacgcggccggacgcgcgcgcgtacccggacgccgcgaaggcctccccctgctcgtggcggaagaggtggttgg

SEQ ID NO: 1280 - DNA, 200 bp, Lolium multiflorum
ggtcccgcgccgcatgatcggcacggacgccttccaggagacgcccatcgtcgaggtcacccgctccatcaccaagcacaactacctcgtcctcgatgtcgaggacatcccccgcgtcatccaggaagccttcttcctcgcctcctctggccgcccgggcccggtgctcgtcgacatccccaaggacatccagcagcaga

SEQ ID NO: 1281 - DNA, 200 bp, Lolium multiflorum
tctgctgctggatgtccttggggatgtcgacgagcaccgggcccgggcggccagaggaggcgaggaagaaggcttcctggatgacgcgggggatgtcctcgacatcgaggacgaggtagttgtgcttggtgatggagcgggtgacctcgacgatgggcgtctcctggaaggcgtccgtgccgatcatgcggcgcgggacc

SEQ ID NO: 1282 - DNA, 200 bp, Lolium multiflorum
atccccaaggacatccagcagcagatggcggtgcccgtctgggacgcgcccatgagtctgccaggctacattgcgcgcctgcctaagccaccggctactgaactgctcgagcaggttctgcgtctggttggtgaggcaagacgcccaattctctatgttggcggtggctgctctgcatccggagaggagctgcgccgctt

SEQ ID NO: 1283 - DNA, 200 bp, Lolium multiflorum
aagcggcgcagctcctctccggatgcagagcagccaccgccaacatagagaattgggcgtcttgcctcaccaaccagacgcagaacctgctcgagcagttcagtagccggtggcttaggcaggcgcgcaatgtagcctggcagactcatgggcgcgtcccagacgggcaccgccatctgctgctggatgtccttggggat

SEQ ID NO: 1284 - DNA, 200 bp, Lolium multiflorum
catccggagaggagctgcgccgctttgttgagctcactgggatcccagttacaactaccctcatgggtcttggcaacttccccagcgacgacccgctgtctctgcgtatgcttgggatgcatggcactgtctacgcaaactacgccgtagataaggctgacctgttgcttgcgtttggcgtgaggtttgatgatcgcgtc

SEQ ID NO: 1285 - DNA, 200 bp, Lolium multiflorum
gacgcgatcatcaaacctcacgccaaacgcaagcaacaggtcagccttatctacggcgtagtttgcgtagacagtgccatgcatcccaagcatacgcagagacagcgggtcgtcgctggggaagttgccaagacccatgagggtagttgtaactgggatcccagtgagctcaacaaagcggcgcagctcctctccggatg

SEQ ID NO: 1286 - DNA, 200 bp, Lolium multiflorum
tggcgtgaggtttgatgatcgcgtcactgggaaaatcgaggcttttgcgagcaggtccaagattgtgcacattgacattgatccagctgagattggcaagaacaagcagccgcatgtctccatttgtgcagatgtcaagctcgctttgcagggcctgaatgctctgctaactgggaccaaagcacaaaagagtttcgatt

SEQ ID NO: 1287 - DNA, 200 bp, Lolium multiflorum
aatcgaaactcttttgtgctttggtcccagttagcagagcattcaggccctgcaaagcgagcttgacatctgcacaaatggagacatgcggctgcttgttcttgccaatctcagctggatcaatgtcaatgtgcacaatcttggacctgctcgcaaaagcctcgattttcccagtgacgcgatcatcaaacctcacgcca

SEQ ID NO: 1288 - DNA, 200 bp, Lolium multiflorum
accaaagcacaaaagagtttcgattttggttcgtggcatgacgagttggagcagcagaaaagggagtttcctctgggatacaaaactttcggggaggccatcccaccgcaatatgctatccaggtactggatgagctcaccaaaggtgaggccatcattgccactggtgttgggcagcaccagatgtgggcggctcagta

SEQ ID NO: 1289 - DNA, 200 bp, Lolium multiflorum
tactgagccgcccacatctggtgctgcccaacaccagtggcaatgatggcctcacctttggtgagctcatccagtacctggatagcatattgcggtgggatggcctccccgaaagttttgtatcccagaggaaactcccttttctgctgctccaactcgtcatgccacgaaccaaaatcgaaactcttttgtgctttggt

SEQ ID NO: 1290 - DNA, 200 bp, Lolium multiflorum
agcaccagatgtgggcggctcagtattacacctacaagcgcccacggcagtggctgtcttcggctggtctcggggcgatggggtttgggctgccagctgcagctggcgccgctgtggctaacccaggtgtcacagttgttgacattgatggggatggtagcttcctcatgaacattcaggagttggcgctgattcgcatt

SEQ ID NO: 1291 - DNA, 200 bp, Lolium multiflorum
aatgcgaatcagcgccaactcctgaatgttcatgaggaagctaccatccccatcaatgtcaacaactgtgacacctgggttagccacagcggcgccagctgcagctggcagcccaaaccccatcgccccgagaccagccgaagacagccactgccgtgggcgcttgtaggtgtaatactgagccgcccacatctggtgct

SEQ ID NO: 1292 - DNA, 200 bp, Lolium multiflorum
tcaggagttggcgctgattcgcattgagaacctcccagttaaggtgatgatattgaacaaccaacatcttggaatggtggtgcagtgggaggacaggttttacaaggccaatcgggcgcatacataccttgggaacccagaaaatgagagtgagatatatccagattttgtgaccattgctaaagggttcaatgttcctg

SEQ ID NO: 1293 - DNA, 200 bp, Lolium multiflorum
caggaacattgaaccctttagcaatggtcacaaaatctggatatatctcactctcattttctgggttcccaaggtatgtatgcgcccgattggccttgtaaaacctgtcctcccactgcaccaccattccaagatgttggttgttcaatatcatcaccttaactgggaggttctcaatgcgaatcagcgccaactcctga

SEQ ID NO: 1294 - DNA, 200 bp, Lolium multiflorum
attgctaaagggttcaatgttcctgcagttcgggtgacaaagaggagtgaagtccgtgcagcaatcaagaagatgcttgagactcctgggccatacttgttggatatcatcgtccctcaccaggagcatgtgctgcctatgatccctagcggtggtgcttttaaggacattatcatggaaggtgatggcaggattgcgta

SEQ ID NO: 1295 - DNA, 200 bp, Lolium multiflorum
tacgcaatcctgccatcaccttccatgataatgtccttaaaagcaccaccgctagggatcataggcagcacatgctcctggtgagggacgatgatatccaacaagtatggcccaggagtctcaagcatcttcttgattgctgcacggacttcactcctctttgtcacccgaactgcaggaacattgaaccctttagcaat

SEQ ID NO: 1296 - DNA, 200 bp, Lolium multiflorum
tggaaggtgatggcaggattgcgtattaatcggaacttctgcaagagctcgacctacaagacctataagtggaatatgcctgatcagcatgatgctggtgtatgttatatccatgtgttcgctaatttgcttgtttgatgagcttggtttgctagtcttacctagctctgaaccttctaggttttctagtctgttctttt

SEQ ID NO: 1297 - DNA, 200 bp, Lolium multiflorum
aaaagaacagactagaaaacctagaaggttcagagctaggtaagactagcaaaccaagctcatcaaacaagcaaattagcgaacacatggatataacatacaccagcatcatgctgatcaggcatattccacttataggtcttgtaggtcgagctcttgcagaagttccgattaatacgcaatcctgccatcaccttcca

SEQ ID NO: 1298 - DNA, 200 bp, Lolium multiflorum
tctaggttttctagtctgttcttttccgtaggcatatgctgtcataagagatcatgcaagtttcttgtcctacatatcaataataagtactttcatggaataattctcagtattttagttccaagtcttctcgccatgtttggttacgtactaagtgcatgtgtaaatgtatgtcgccccgatgggggatcaacgacaag

SEQ ID NO: 1299 - DNA, 200 bp, Lolium multiflorum
cttgtcgttgatcccccatcggggcgacatacatttacacatgcacttagtacgtaaccaaacatggcgagaagacttggaactaaaatactgagaattattccatgaaagtacttattattgatatgtaggacaagaaacttgcatgatctcttatgacagcatatgcctacggaaaagaacagactagaaaacctaga

SEQ ID NO: 1300 - DNA, 200 bp, Lolium multiflorum
gccccgatgggggatcaacgacaagttctggactgggaaatcagactgagtttgggtggaaggagaacatacatatgttcatatcatcgttcctttcgttcagtaaccatcgacccacaagccatcctaactaacagactacgagacacagaatttgaacaatatatgctacttgttcacttgcgtttgaggtacgtgat

SEQ ID NO: 1301 - DNA, 200 bp, Lolium multiflorum
atcacgtacctcaaacgcaagtgaacaagtagcatatattgttcaaattctgtgtctcgtagtctgttagttaggatggcttgtgggtcgatggttactgaacgaaaggaacgatgatatgaacatatgtatgttctccttccacccaaactcagtctgatttcccagtccagaacttgtcgttgatcccccatcggggc

SEQ ID NO: 1302 - DNA, 200 bp, Lolium multiflorum
ttcacttgcgtttgaggtacgtgatgaagaatctcttgggaatatgggttttattgtatataaaagaagacaatctttctgtgagatagagaatcttgagaatatcctcatagatttttcaaggatacttttggatatcatgtattacctgtaggcatgcaagtgcctggtgagtatgcttaaaccataacagttttaat

SEQ ID NO: 1303 - DNA, 200 bp, Lolium multiflorum
attaaaactgttatggtttaagcatactcaccaggcacttgcatgcctacaggtaatacatgatatccaaaagtatccttgaaaaatctatgaggatattctcaagattctctatctcacagaaagattgtcttcttttatatacaataaaacccatattcccaagagattcttcatcacgtacctcaaacgcaagtgaa

SEQ ID NO: 1304 - DNA, 200 bp, Lolium multiflorum
atgcttaaaccataacagttttaatttatcatgacagatctccacaaaatagccagaatagttgtgcctaaaataagtaatgttttctttgtggcaagcacagatgaaggtgcccaactttgtttcacttttagcacatatttctcctttattttgtagtcctctatttcttattcttaggtcttaacagatcttttgct

SEQ ID NO: 1305 - DNA, 200 bp, Lolium multiflorum
agcaaaagatctgttaagacctaagaataagaaatagaggactacaaaataaaggagaaatatgtgctaaaagtgaaacaaagttgggcaccttcatctgtgcttgccacaaagaaaacattacttattttaggcacaactattctggctattttgtggagatctgtcatgataaattaaaactgttatggtttaagcat

SEQ ID NO: 1306 - DNA, 200 bp, Lolium multiflorum
cttaggtcttaacagatcttttgctaatggtctcttcgattttgagctcctctttctatttcataggataatatcttaggctaatgtaatactggccttgatatgtttgtgcgtgtgtcttctggtcttgcttactcaaaagtattcgtacccacgggtgaatccaggagcgatgttgatgcattcagcttttgcggatt

SEQ ID NO: 1307 - DNA, 200 bp, Lolium multiflorum
aatccgcaaaagctgaatgcatcaacatcgctcctggattcacccgtgggtacgaatacttttgagtaagcaagaccagaagacacacgcacaaacatatcaaggccagtattacattagcctaagatattatcctatgaaatagaaagaggagctcaaaatcgaagagaccattagcaaaagatctgttaagacctaag

SEQ ID NO: 1308 - DNA, 200 bp, Lolium multiflorum
ttgatgcattcagcttttgcggattgatgttggttagatggatctggatggacctatgttagttttagctctgcatgagtggttaccttatattcccaagcttcatgttcagtggaccttttttttttgaccgaatgttcagtggaccttggtggagactcatgtagcctctgtacattcgttcttggtatgtgaattct

SEQ ID NO: 1309 - DNA, 200 bp, Lolium multiflorum
agaattcacataccaagaacgaatgtacagaggctacatgagtctccaccaaggtccactgaacattcggtcaaaaaaaaaaggtccactgaacatgaagcttgggaatataaggtaaccactcatgcagagctaaaactaacataggtccatccagatccatctaaccaacatcaatccgcaaaagctgaatgcatcaa

SEQ ID NO: 1310 - DNA, 200 bp, Lolium multiflorum
cattcgttcttggtatgtgaattcttaaatatatttatatatgaatgctaagctccatggtgaagcacgattctgtctttgattacttcttcggtggggctgttgttctctgttaataaaaagtcttcacatgtagcctacctgtaagatattgattggtgttgactgtgcaggagcttagagtttaggaaccaagtgca

SEQ ID NO: 1311 - DNA, 200 bp, Lolium multiflorum
tgcacttggttcctaaactctaagctcctgcacagtcaacaccaatcaatatcttacaggtaggctacatgtgaagactttttattaacagagaacaacagccccaccgaagaagtaatcaaagacagaatcgtgcttcaccatggagcttagcattcatatataaatatatttaagaattcacataccaagaacgaatg

SEQ ID NO: 1312 - DNA, 200 bp, Lolium multiflorum
gcttagagtttaggaaccaagtgcaaactttatttataaaaccaagaatattaaataaggtatttttttttacaaattagcatccgtatctatctggtgtaacaatcgaagagaggtattgttgtttttgttaagttcatacatttacgtgttacttagattcacgcaaatgtacatactccatctgattgtatcattta

SEQ ID NO: 1313 - DNA, 200 bp, Lolium multiflorum
taaatgatacaatcagatggagtatgtacatttgcgtgaatctaagtaacacgtaaatgtatgaacttaacaaaaacaacaatacctctcttcgattgttacaccagatagatacggatgctaatttgtaaaaaaaaataccttatttaatattcttggttttataaataaagtttgcacttggttcctaaactctaagc

SEQ ID NO: 1314 - DNA, 200 bp, Lolium multiflorum
atactccatctgattgtatcatttatcgtttttgtttggggtcgcgcagctagcaagctgcgccttccttacatctgttgctcttggcataacggtgttggttattgtaatgtattttcctattttcctgattgtataagcatttggtactcctttcatgattttgtttgctcttatcctaatttctctcttatctgctt

SEQ ID NO: 1315 - DNA, 200 bp, Lolium multiflorum
aagcagataagagagaaattaggataagagcaaacaaaatcatgaaaggagtaccaaatgcttatacaatcaggaaaataggaaaatacattacaataaccaacaccgttatgccaagagcaacagatgtaaggaaggcgcagcttgctagctgcgcgaccccaaacaaaaacgataaatgatacaatcagatggagtat

SEQ ID NO: 1316 - DNA, 200 bp, Lolium multiflorum
atcctaatttctctcttatctgcttcgttttgtaaaaatttaaaaacatattattattttcctgcctgctttttattgtcgttatacgaaatgtaaatagtggtgaattccacgggtacaactcttaatctagtatctttacagctgtaagaacattgcaaggattgaatttctctacggaaataaagaatttttgaaat

SEQ ID NO: 1317 - DNA, 200 bp, Lolium multiflorum
atttcaaaaattctttatttccgtagagaaattcaatccttgcaatgttcttacagctgtaaagatactagattaagagttgtacccgtggaattcaccactatttacatttcgtataacgacaataaaaagcaggcaggaaaataataatatgtttttaaatttttacaaaacgaagcagataagagagaaattaggat

SEQ ID NO: 1318 - DNA, 200 bp, Lolium multiflorum
tacggaaataaagaatttttgaaattttcagaatttcgggaagtcacatcaatgattttgtcaacctattaatgaaactttcaggagtgtactgtccttcatggtttcagatatttccgaacaagtaaaatatcatgacagcggaaggctcccttgctgtgcgttgccctctgaacttgtaagaaccgtatttagcatct

SEQ ID NO: 1319 - DNA, 200 bp, Lolium multiflorum
agatgctaaatacggttcttacaagttcagagggcaacgcacagcaagggagccttccgctgtcatgatattttacttgttcggaaatatctgaaaccatgaaggacagtacactcctgaaagtttcattaataggttgacaaaatcattgatgtgacttcccgaaattctgaaaatttcaaaaattctttatttccgta

SEQ ID NO: 1320 - DNA, 200 bp, Lolium multiflorum
cttgtaagaaccgtatttagcatcttccttgcaagtgcagcaattgatctccaatagcagcgagttaaccattgacacggcatcagaagtccaaaactcataagtactgtacttttttttttgtagaaatggcatgcatccgagggtggatgatgaattgtacatagcttacattttccttattatgtcatgcagtgcca

SEQ ID NO: 1321 - DNA, 200 bp, Lolium multiflorum
tggcactgcatgacataataaggaaaatgtaagctatgtacaattcatcatccaccctcggatgcatgccatttctacaaaaaaaaaagtacagtacttatgagttttggacttctgatgccgtgtcaatggttaactcgctgctattggagatcaattgctgcacttgcaaggaagatgctaaatacggttcttacaag

SEQ ID NO: 1322 - DNA, 200 bp, Lolium multiflorum
ttccttattatgtcatgcagtgccaacattcagagaaggggctctatcatcattacgcaaagctaataactaataagctccatttggtacagatagccaatgatcaagcgtccacgggatgggatctgatttgtgatagcacatgagttgtctcattagaaaattcgccacaactccctagttttccttttcacatcatt

SEQ ID NO: 1323 - DNA, 200 bp, Lolium multiflorum
aatgatgtgaaaaggaaaactagggagttgtggcgaattttctaatgagacaactcatgtgctatcacaaatcagatcccatcccgtggacgcttgatcattggctatctgtaccaaatggagcttattagttattagctttgcgtaatgatgatagagccccttctctgaatgttggcactgcatgacataataaggaa

SEQ ID NO: 1324 - DNA, 200 bp, Lolium multiflorum
ccctagttttccttttcacatcattttagtgtgtgctggtccggtagctccataaacaaagcgatcatggacaccgcaaaaatcacagctaaccacagcttcaaagatcgtgggagcccccactgaatcataattacatctacgctacagcctgaacagggtgtcatatactcgtatcctgctgtttaggcgcagcccaa

SEQ ID NO: 1325 - DNA, 200 bp, Lolium multiflorum
ttgggctgcgcctaaacagcaggatacgagtatatgacaccctgttcaggctgtagcgtagatgtaattatgattcagtgggggctcccacgatctttgaagctgtggttagctgtgatttttgcggtgtccatgatcgctttgtttatggagctaccggaccagcacacactaaaatgatgtgaaaaggaaaactaggg

SEQ ID NO: 1326 - DNA, 200 bp, Lolium multiflorum
atcctgctgtttaggcgcagcccaaagaaccaaacatccttcacagctgcaaaaaagagatttgattttactgaaaccatgtctacagagacatgtttatgggttgctgaatgacagatccacttggcatgtttcaaacccttatttatgtatttacaaacaataaaacctcagaactaggccaaaacttctgtgaggaa

SEQ ID NO: 1327 - DNA, 200 bp, Lolium multiflorum
ttcctcacagaagttttggcctagttctgaggttttattgtttgtaaatacataaataagggtttgaaacatgccaagtggatctgtcattcagcaacccataaacatgtctctgtagacatggtttcagtaaaatcaaatctcttttttgcagctgtgaaggatgtttggttctttgggctgcgcctaaacagcaggat

SEQ ID NO: 1328 - DNA, 200 bp, Lolium multiflorum
actaggccaaaacttctgtgaggaatatatctacagctgtatgtgtttgacatgatctatggttttaagaggttcatggaaacataacaatcattgtgatagctgataactggcagacaaaaaaagggtgaaagaccgatttaacaagttgtgagcagatcgcaggcgagctcaaaagaagtacaagccagctcggggca

SEQ ID NO: 1329 - DNA, 200 bp, Lolium multiflorum
tgccccgagctggcttgtacttcttttgagctcgcctgcgatctgctcacaacttgttaaatcggtctttcaccctttttttgtctgccagttatcagctatcacaatgattgttatgtttccatgaacctcttaaaaccatagatcatgtcaaacacatacagctgtagatatattcctcacagaagttttggcctagt

SEQ ID NO: 1330 - DNA, 200 bp, Lolium multiflorum
aagaagtacaagccagctcggggcacatgtaaagaggtctgataggagatgattcagtacgcatcaccgcagacgaactagatttacatgatttaacagtctagtaggagcatttggtacaaagatggaccaccccaaacctggcaccccttgacattcattcaagaactacctacccagaattgataatacccgtcacc

SEQ ID NO: 1331 - DNA, 200 bp, Lolium multiflorum
ggtgacgggtattatcaattctgggtaggtagttcttgaatgaatgtcaaggggtgccaggtttggggtggtccatctttgtaccaaatgctcctactagactgttaaatcatgtaaatctagttcgtctgcggtgatgcgtactgaatcatctcctatcagacctctttacatgtgccccgagctggcttgtacttctt

SEQ ID NO: 1332 - DNA, 200 bp, Lolium multiflorum
cccagaattgataatacccgtcaccgaaatctcttatccttttggaggaggatatttgggttcctcttagatcctgttagctcgccccatctcgtccctggtccatgaacgcgtgaagaaatgctccagagggtgtctccttgctggccagccgcatctttcgttggctttgaaatagctttggatttcatcagaggatt

SEQ ID NO: 1333 - DNA, 200 bp, Lolium multiflorum
aatcctctgatgaaatccaaagctatttcaaagccaacgaaagatgcggctggccagcaaggagacaccctctggagcatttcttcacgcgttcatggaccagggacgagatggggcgagctaacaggatctaagaggaacccaaatatcctcctccaaaaggataagagatttcggtgacgggtattatcaattctggg

SEQ ID NO: 1334 - DNA, 200 bp, Lolium multiflorum
tagctttggatttcatcagaggattcttgttgcctttacccatgccagctcctagcagccatcttgagccagcttgctgctgtgtttgattaccccatggttttgtcttctcaggctcgctcttaaagccagctacatgcacttctgtgactttaaactgaggggcagaatcttcctcctcgatcttttcttcagcaacc

SEQ ID NO: 1335 - DNA, 200 bp, Lolium multiflorum
ggttgctgaagaaaagatcgaggaggaagattctgcccctcagtttaaagtcacagaagtgcatgtagctggctttaagagcgagcctgagaagacaaaaccatggggtaatcaaacacagcagcaagctggctcaagatggctgctaggagctggcatgggtaaaggcaacaagaatcctctgatgaaatccaaagcta

SEQ ID NO: 1336 - DNA, 200 bp, Lolium multiflorum
ctcctcgatcttttcttcagcaaccaatgccttatctagaatctcctcagtcttgggctcctcataatattcctcactgttacctttctccgaaacagtgttgtatatcttgggctttgggggaataaaaaccctctccacttgaatcagagaaagcatcggtgtgccaactggctcatagttacgtagcgggtcacgca

SEQ ID NO: 1337 - DNA, 200 bp, Lolium multiflorum
tgcgtgacccgctacgtaactatgagccagttggcacaccgatgctttctctgattcaagtggagagggtttttattcccccaaagcccaagatatacaacactgtttcggagaaaggtaacagtgaggaatattatgaggagcccaagactgaggagattctagataaggcattggttgctgaagaaaagatcgaggag

SEQ ID NO: 1338 - DNA, 200 bp, Lolium multiflorum
tcatagttacgtagcgggtcacgcaactgaaccataagagcaactgtgaagttgttccccaacaaaccccatcttctaccagatcttctgcttttcttgtccgcattctggttttcagcaagtaggtccattgatttggcatggtgggcagcaagtattttcgatgtacggtcactgaactgttcctcttcatcgaccac

SEQ ID NO: 1339 - DNA, 200 bp, Lolium multiflorum
gtggtcgatgaagaggaacagttcagtgaccgtacatcgaaaatacttgctgcccaccatgccaaatcaatggacctacttgctgaaaaccagaatgcggacaagaaaagcagaagatctggtagaagatggggtttgttggggaacaacttcacagttgctcttatggttcagttgcgtgacccgctacgtaactatga

SEQ ID NO: 1340 - DNA, 200 bp, Lolium multiflorum
tgaactgttcctcttcatcgaccactccagaatcaagtctcatccactcatctagagtgattgataatcccattagtccatcaacatcaccaccactttgtttaacatccagaagctgcaatcccgcagtcccttctaacccaagggtccgtgtattctctgcgcattttccttgcagagatgaaatctcaccaacaggg

SEQ ID NO: 1341 - DNA, 200 bp, Lolium multiflorum
ccctgttggtgagatttcatctctgcaaggaaaatgcgcagagaatacacggacccttgggttagaagggactgcgggattgcagcttctggatgttaaacaaagtggtggtgatgttgatggactaatgggattatcaatcactctagatgagtggatgagacttgattctggagtggtcgatgaagaggaacagttca

SEQ ID NO: 1342 - DNA, 200 bp, Lolium multiflorum
cagagatgaaatctcaccaacagggtgggcactgatattggagggtgcctcttcttcagacatgccagattgtatcctcagaccctcaatagaaagggcttcaattttttccatagctaatggggcaaggtcctcaagtgaaacatattccgaagcatttatcccacccaatgatgatgacagatcagcacctcttcttt

SEQ ID NO: 1343 - DNA, 200 bp, Lolium multiflorum
aaagaagaggtgctgatctgtcatcatcattgggtgggataaatgcttcggaatatgtttcacttgaggaccttgccccattagctatggaaaaaattgaagccctttctattgagggtctgaggatacaatctggcatgtctgaagaagaggcaccctccaatatcagtgcccaccctgttggtgagatttcatctctg

SEQ ID NO: 1344 - DNA, 200 bp, Lolium multiflorum
gatgacagatcagcacctcttcttttcttcttctttcccaagggagcatcactgacccctcctgctaaagcttccatgctatggttctccaataggtcgtatctgcatttgttagagcaatatgttttagccagggtaaatggttaagtaggaagtcatgagcaagcatgacaagaaagatttctaaccttccagcagac

SEQ ID NO: 1345 - DNA, 200 bp, Lolium multiflorum
gtctgctggaaggttagaaatctttcttgtcatgcttgctcatgacttcctacttaaccatttaccctggctaaaacatattgctctaacaaatgcagatacgacctattggagaaccatagcatggaagctttagcaggaggggtcagtgatgctcccttgggaaagaagaagaaaagaagaggtgctgatctgtcatc

SEQ ID NO: 1346 - DNA, 200 bp, Lolium multiflorum
aaagatttctaaccttccagcagactctagagcaggacaagccccccaggcgagctgctgcatcattttgccattcacatcttccaagggcataagtttgtttgcttgcattgatagcttttcgattccaactgaagctagaccgtgcaatatctccataattccagatcccatttctgctggtagcacgattggagaag

SEQ ID NO: 1347 - DNA, 200 bp, Lolium multiflorum
cttctccaatcgtgctaccagcagaaatgggatctggaattatggagatattgcacggtctagcttcagttggaatcgaaaagctatcaatgcaagcaaacaaacttatgcccttggaagatgtgaatggcaaaatgatgcagcagctcgcctggggggcttgtcctgctctagagtctgctggaaggttagaaatcttt

SEQ ID NO: 1348 - DNA, 200 bp, Lolium multiflorum
tctgctggtagcacgattggagaagaagcctgcatgaccaggctacagttgttctttgcattcttgaaaagagctggattcatcgaccgcagaaatcctccatcttctgtctgaataaatgggcccaaaccatcagccaaaggcggcagctcgaggggcagctcaggtggtatgtcaatggggctaccaaacccacttct

SEQ ID NO: 1349 - DNA, 200 bp, Lolium multiflorum
agaagtgggtttggtagccccattgacataccacctgagctgcccctcgagctgccgcctttggctgatggtttgggcccatttattcagacagaagatggaggatttctgcggtcgatgaatccagctcttttcaagaatgcaaagaacaactgtagcctggtcatgcaggcttcttctccaatcgtgctaccagcaga

SEQ ID NO: 1350 - DNA, 200 bp, Lolium multiflorum
caatggggctaccaaacccacttctagttccacgtggggaagattggaaggacttctcatttagcccgaactgacgcatcaaagcttcagcttcctggtcttccagtgacttggctgtaaatgtggcgtctatgggcggagctgcactctgcagctcaagctcagcctcgtgtatgattgtggagagatcaaattcctct

SEQ ID NO: 1351 - DNA, 200 bp, Lolium multiflorum
agaggaatttgatctctccacaatcatacacgaggctgagcttgagctgcagagtgcagctccgcccatagacgccacatttacagccaagtcactggaagaccaggaagctgaagctttgatgcgtcagttcgggctaaatgagaagtccttccaatcttccccacgtggaactagaagtgggtttggtagccccattg

SEQ ID NO: 1352 - DNA, 200 bp, Lolium multiflorum
gattgtggagagatcaaattcctctgcaaagtcgtcacaactagcttcgtccgctccatcttcgaaatccaaacctagaatacagtccccagattccagagcttctttttcgaattgcttccaaagcttctccctcggcgactctgaatcactgtctgtggttggcccaaatgggctatgctcgatcccaagcatttcca

SEQ ID NO: 1353 - DNA, 200 bp, Lolium multiflorum
tggaaatgcttgggatcgagcatagcccatttgggccaaccacagacagtgattcagagtcgccgagggagaagctttggaagcaattcgaaaaagaagctctggaatctggggactgtattctaggtttggatttcgaagatggagcggacgaagctagttgtgacgactttgcagaggaatttgatctctccacaatc

SEQ ID NO: 1354 - DNA, 200 bp, Lolium multiflorum
ctatgctcgatcccaagcatttccaaaaactcgctagcaacaaaatcagacgaagcatccacgctgcgtgatctgctcttcctgctggcggaattgtaaccgtcttccgcgcccatgcagctcattcgcctagacagcttatcgtccacggttggcgaatcaaattcctctggctccacgattgcgaatttgttgaacaa

SEQ ID NO: 1355 - DNA, 200 bp, Lolium multiflorum
ttgttcaacaaattcgcaatcgtggagccagaggaatttgattcgccaaccgtggacgataagctgtctaggcgaatgagctgcatgggcgcggaagacggttacaattccgccagcaggaagagcagatcacgcagcgtggatgcttcgtctgattttgttgctagcgagtttttggaaatgcttgggatcgagcatag

SEQ ID NO: 1356 - DNA, 200 bp, Lolium multiflorum
ccacgattgcgaatttgttgaacaaggactccagatcctccagctctgcatcctctgccagctgaccatcttcttccaatgatgaagtagggagcaaggctgcttcgaccggcgcatcctgctcgtctcccacatcgtccgtttcaggagcaacatcgctgggctcctcttgcagcttcacttcaacggtgccgtcttta

SEQ ID NO: 1357 - DNA, 200 bp, Lolium multiflorum
taaagacggcaccgttgaagtgaagctgcaagaggagcccagcgatgttgctcctgaaacggacgatgtgggagacgagcaggatgcgccggtcgaagcagccttgctccctacttcatcattggaagaagatggtcagctggcagaggatgcagagctggaggatctggagtccttgttcaacaaattcgcaatcgtgg

SEQ ID NO: 1358 - DNA, 200 bp, Lolium multiflorum
cttcacttcaacggtgccgtctttagcaggatcgtcgcttaaaaatgcaggtttggtcgttgcctcttcattagcttccccattaaaattctctgcacggtcagccacatagtcagccttggcaggtttgagctgctctaggtcctggagggcgacctcaactccctgctcaaccacactgaactctgcgctatagcaat

SEQ ID NO: 1359 - DNA, 200 bp, Lolium multiflorum
attgctatagcgcagagttcagtgtggttgagcagggagttgaggtcgccctccaggacctagagcagctcaaacctgccaaggctgactatgtggctgaccgtgcagagaattttaatggggaagctaatgaagaggcaacgaccaaacctgcatttttaagcgacgatcctgctaaagacggcaccgttgaagtgaag

SEQ ID NO: 1360 - DNA, 200 bp, Lolium multiflorum
acactgaactctgcgctatagcaatcgccatctggatgcgcaaagtccccctcccccttcttcacctccaccgacgtgcaatgctttgactccggcgagccatcctcctcgggttctactgctgccttttttgtggcatcaagacctgcgtcaccagcaaaggccaaggctttggcaggcctggtggtgctgggcagaac

SEQ ID NO: 1361 - DNA, 200 bp, Lolium multiflorum
gttctgcccagcaccaccaggcctgccaaagccttggcctttgctggtgacgcaggtcttgatgccacaaaaaaggcagcagtagaacccgaggaggatggctcgccggagtcaaagcattgcacgtcggtggaggtgaagaagggggagggggactttgcgcatccagatggcgattgctatagcgcagagttcagtgt

SEQ ID NO: 1362 - DNA, 200 bp, Lolium multiflorum
gggtgacaaagaggagtgaagtccgtgcagcaatcaagaagatgcttgagacccctgggccatacttgttggatatcatcgtccctcaccaggagcatgtgcttcctatgatccctagcggtggtgcttttaaggacattatcatggaaggtgatggcaggattgcgtattaatcgggacttctgcaagagctccaccta

SEQ ID NO: 1363 - DNA, 200 bp, Lolium multiflorum
taggtggagctcttgcagaagtcccgattaatacgcaatcctgccatcaccttccatgataatgtccttaaaagcaccaccgctagggatcataggaagcacatgctcctggtgagggacgatgatatccaacaagtatggcccaggggtctcaagcatcttcttgattgctgcacggacttcactcctctttgtcaccc

SEQ ID NO: 1364 - DNA, 21 bp, Unknown
  Found in multiple species
tggacctgttttgattgatat

SEQ ID NO: 1365 - DNA, 21 bp, Unknown
  Found in multiple species
tcataggcagcacatgctcct

SEQ ID NO: 1366 - DNA, 21 bp, Unknown
  Found in multiple species
tatcaatcaaaacaggtccag

SEQ ID NO: 1367 - DNA, 21 bp, Unknown
  Found in multiple species
gggatcataggcagcacatgc

SEQ ID NO: 1368 - DNA, 21 bp, Unknown
  Found in multiple species
ggatcataggcagcacatgct

SEQ ID NO: 1369 - DNA, 21 bp, Unknown
  Found in multiple species
ggagcatgtgctgcctatgat

SEQ ID NO: 1370 - DNA, 21 bp, Unknown
  Found in multiple species
gcatgtgctgcctatgatccc

SEQ ID NO: 1371 - DNA, 21 bp, Unknown
  Found in multiple species
gatcataggcagcacatgctc

SEQ ID NO: 1372 - DNA, 21 bp, Unknown
  Found in multiple species
gagcatgtgctgcctatgatc

SEQ ID NO: 1373 - DNA, 21 bp, Unknown
  Found in multiple species
ctggacctgttttgattgata

SEQ ID NO: 1374 - DNA, 21 bp, Unknown
  Found in multiple species
cctggacctgttttgattgat

SEQ ID NO: 1375 - DNA, 21 bp, Unknown
  Found in multiple species
cataggcagcacatgctcctg

SEQ ID NO: 1376 - DNA, 21 bp, Unknown
  Found in multiple species
caggagcatgtgctgcctatg

SEQ ID NO: 1377 - DNA, 21 bp, Unknown
  Found in multiple species
atcataggcagcacatgctcc

SEQ ID NO: 1378 - DNA, 21 bp, Unknown
  Found in multiple species
atcaatcaaaacaggtccagg

SEQ ID NO: 1379 - DNA, 21 bp, Unknown
  Found in multiple species
atatcaatcaaaacaggtcca

SEQ ID NO: 1380 - DNA, 21 bp, Unknown
  Found in multiple species
aggagcatgtgctgcctatga

SEQ ID NO: 1381 - DNA, 21 bp, Unknown
  Found in multiple species
agcatgtgctgcctatgatcc

SEQ ID NO: 1382 - DNA, 21 bp, Unknown
  Found in multiple species
ttgttgctgaatatctttagg

SEQ ID NO: 1383 - DNA, 21 bp, Unknown
  Found in multiple species
ttctggtagacctggacctgt

SEQ ID NO: 1384 - DNA, 21 bp, Unknown
  Found in multiple species
tgttgctgaatatctttagga

SEQ ID NO: 1385 - DNA, 21 bp, Unknown
  Found in multiple species
tgtgctgcctatgatccctag

SEQ ID NO: 1386 - DNA, 21 bp, Unknown
  Found in multiple species
tggtagacctggacctgtttt

SEQ ID NO: 1387 - DNA, 21 bp, Unknown
  Found in multiple species
tgctgcctatgatccctagcg

SEQ ID NO: 1388 - DNA, 21 bp, Unknown
  Found in multiple species
tctggtagacctggacctgtt

SEQ ID NO: 1389 - DNA, 21 bp, Unknown
  Found in multiple species
tcctaaagatattcagcaaca

SEQ ID NO: 1390 - DNA, 21 bp, Unknown
  Found in multiple species
tccaggtctaccagaattagc

SEQ ID NO: 1391 - DNA, 21 bp, Unknown
  Found in multiple species
tcaggagcatgtgctgcctat

SEQ ID NO: 1392 - DNA, 21 bp, Unknown
  Found in multiple species
tcaatcaaaacaggtccaggt

SEQ ID NO: 1393 - DNA, 21 bp, Unknown
  Found in multiple species
tcaaaacaggtccaggtctac

SEQ ID NO: 1394 - DNA, 21 bp, Unknown
  Found in multiple species
tagggatcataggcagcacat

SEQ ID NO: 1395 - DNA, 21 bp, Unknown
  Found in multiple species
taggcagcacatgctcctgat

SEQ ID NO: 1396 - DNA, 21 bp, Unknown
  Found in multiple species
tagacctggacctgttttgat

SEQ ID NO: 1397 - DNA, 21 bp, Unknown
  Found in multiple species
taattctggtagacctggacc

SEQ ID NO: 1398 - DNA, 21 bp, Unknown
  Found in multiple species
taaagatattcagcaacaatt

SEQ ID NO: 1399 - DNA, 21 bp, Unknown
  Found in multiple species
gtgctgcctatgatccctagc

SEQ ID NO: 1400 - DNA, 21 bp, Unknown
  Found in multiple species
gtccaggtctaccagaattag

SEQ ID NO: 1401 - DNA, 21 bp, Unknown
  Found in multiple species
gtagacctggacctgttttga

SEQ ID NO: 1402 - DNA, 21 bp, Unknown
  Found in multiple species
ggtccaggtctaccagaatta

SEQ ID NO: 1403 - DNA, 21 bp, Unknown
  Found in multiple species
ggtagacctggacctgttttg

SEQ ID NO: 1404 - DNA, 21 bp, Unknown
  Found in multiple species
gctgcctatgatccctagcgg

SEQ ID NO: 1405 - DNA, 21 bp, Unknown
  Found in multiple species
gctagggatcataggcagcac

SEQ ID NO: 1406 - DNA, 21 bp, Unknown
  Found in multiple species
gctaattctggtagacctgga

SEQ ID NO: 1407 - DNA, 21 bp, Unknown
  Found in multiple species
gacctggacctgttttgattg

SEQ ID NO: 1408 - DNA, 21 bp, Unknown
  Found in multiple species
ctggtagacctggacctgttt

SEQ ID NO: 1409 - DNA, 21 bp, Unknown
  Found in multiple species
ctagggatcataggcagcaca

SEQ ID NO: 1410 - DNA, 21 bp, Unknown
  Found in multiple species
ctaattctggtagacctggac

SEQ ID NO: 1411 - DNA, 21 bp, Unknown
  Found in multiple species
ctaaagatattcagcaacaat

SEQ ID NO: 1412 - DNA, 21 bp, Unknown
  Found in multiple species
cgctagggatcataggcagca

SEQ ID NO: 1413 - DNA, 21 bp, Unknown
  Found in multiple species
cctaaagatattcagcaacaa

SEQ ID NO: 1414 - DNA, 21 bp, Unknown
  Found in multiple species
ccgctagggatcataggcagc

SEQ ID NO: 1415 - DNA, 21 bp, Unknown
  Found in multiple species
catgtgctgcctatgatccct

SEQ ID NO: 1416 - DNA, 21 bp, Unknown
  Found in multiple species
catcaggagcatgtgctgcct

SEQ ID NO: 1417 - DNA, 21 bp, Unknown
  Found in multiple species
caggtccaggtctaccagaat

SEQ ID NO: 1418 - DNA, 21 bp, Unknown
  Found in multiple species
caatcaaaacaggtccaggtc

SEQ ID NO: 1419 - DNA, 21 bp, Unknown
  Found in multiple species
caaaacaggtccaggtctacc

SEQ ID NO: 1420 - DNA, 21 bp, Unknown
  Found in multiple species
attgttgctgaatatctttag

SEQ ID NO: 1421 - DNA, 21 bp, Unknown
  Found in multiple species
attctggtagacctggacctg

SEQ ID NO: 1422 - DNA, 21 bp, Unknown
  Found in multiple species
atgtgctgcctatgatcccta

SEQ ID NO: 1423 - DNA, 21 bp, Unknown
  Found in multiple species
atcaggagcatgtgctgccta

SEQ ID NO: 1424 - DNA, 21 bp, Unknown
  Found in multiple species
atcaaaacaggtccaggtcta

SEQ ID NO: 1425 - DNA, 21 bp, Unknown
  Found in multiple species
ataggcagcacatgctcctga

SEQ ID NO: 1426 - DNA, 21 bp, Unknown
  Found in multiple species
aggtccaggtctaccagaatt

SEQ ID NO: 1427 - DNA, 21 bp, Unknown
  Found in multiple species
agggatcataggcagcacatg

SEQ ID NO: 1428 - DNA, 21 bp, Unknown
  Found in multiple species
aggcagcacatgctcctgatg

SEQ ID NO: 1429 - DNA, 21 bp, Unknown
  Found in multiple species
agacctggacctgttttgatt

SEQ ID NO: 1430 - DNA, 21 bp, Unknown
  Found in multiple species
acctggacctgttttgattga

SEQ ID NO: 1431 - DNA, 21 bp, Unknown
  Found in multiple species
acaggtccaggtctaccagaa

SEQ ID NO: 1432 - DNA, 21 bp, Unknown
  Found in multiple species
aattgttgctgaatatcttta

SEQ ID NO: 1433 - DNA, 21 bp, Unknown
  Found in multiple species
aattctggtagacctggacct

SEQ ID NO: 1434 - DNA, 21 bp, Unknown
  Found in multiple species
aatcaaaacaggtccaggtct

SEQ ID NO: 1435 - DNA, 21 bp, Unknown
  Found in multiple species
aacaggtccaggtctaccaga

SEQ ID NO: 1436 - DNA, 21 bp, Unknown
  Found in multiple species
aaacaggtccaggtctaccag

SEQ ID NO: 1437 - DNA, 21 bp, Unknown
  Found in multiple species
aaaacaggtccaggtctacca

SEQ ID NO: 1438 - DNA, 21 bp, Unknown
  Found in multiple species
tttgagcatatccgggaagat

SEQ ID NO: 1439 - DNA, 21 bp, Unknown
  Found in multiple species
tttaggcaacctagaaagata

SEQ ID NO: 1440 - DNA, 21 bp, Unknown
  Found in multiple species
ttggttggagatctttataga

SEQ ID NO: 1441 - DNA, 21 bp, Unknown
  Found in multiple species
ttggagatctttatagaggag

SEQ ID NO: 1442 - DNA, 21 bp, Unknown
  Found in multiple species
ttgagcatatccgggaagatt

SEQ ID NO: 1443 - DNA, 21 bp, Unknown
  Found in multiple species
ttcttccgaaatcttcccgga

SEQ ID NO: 1444 - DNA, 21 bp, Unknown
  Found in multiple species
ttctcctctataaagatctcc

SEQ ID NO: 1445 - DNA, 21 bp, Unknown
  Found in multiple species
ttccgaaatcttcccggatat

SEQ ID NO: 1446 - DNA, 21 bp, Unknown
  Found in multiple species
ttcccgaggtatgtatgtgcc

SEQ ID NO: 1447 - DNA, 21 bp, Unknown
  Found in multiple species
ttcaaacaatgttggatactc

SEQ ID NO: 1448 - DNA, 21 bp, Unknown
  Found in multiple species
ttattagttggttggagatct

SEQ ID NO: 1449 - DNA, 21 bp, Unknown
  Found in multiple species
ttagttggttggagatcttta

SEQ ID NO: 1450 - DNA, 21 bp, Unknown
  Found in multiple species
ttaggcaacctagaaagatac

SEQ ID NO: 1451 - DNA, 21 bp, Unknown
  Found in multiple species
ttagctaattctggtagacct

SEQ ID NO: 1452 - DNA, 21 bp, Unknown
  Found in multiple species
ttaccaaggtgagcgatttaa

SEQ ID NO: 1453 - DNA, 21 bp, Unknown
  Found in multiple species
ttaaatcgctcaccttggtaa

SEQ ID NO: 1454 - DNA, 21 bp, Unknown
  Found in multiple species
tgttaccaaggtgagcgattt

SEQ ID NO: 1455 - DNA, 21 bp, Unknown
  Found in multiple species
tgtggtacgattacatccagc

SEQ ID NO: 1456 - DNA, 21 bp, Unknown
  Found in multiple species
tgtaatcgtaccacatcagga

SEQ ID NO: 1457 - DNA, 21 bp, Unknown
  Found in multiple species
tggttggagatctttatagag

SEQ ID NO: 1458 - DNA, 21 bp, Unknown
  Found in multiple species
tggtgttagatgttgaggata

SEQ ID NO: 1459 - DNA, 21 bp, Unknown
  Found in multiple species
tggtatatcacatgcttcagc

SEQ ID NO: 1460 - DNA, 21 bp, Unknown
  Found in multiple species
tggtacgattacatccagcag

SEQ ID NO: 1461 - DNA, 21 bp, Unknown
  Found in multiple species
tgggtatctttctaggttgcc

SEQ ID NO: 1462 - DNA, 21 bp, Unknown
  Found in multiple species
tggatgtaatcgtaccacatc

SEQ ID NO: 1463 - DNA, 21 bp, Unknown
  Found in multiple species
tggagtatccaacattgtttg

SEQ ID NO: 1464 - DNA, 21 bp, Unknown
  Found in multiple species
tggagatctttatagaggaga

SEQ ID NO: 1465 - DNA, 21 bp, Unknown
  Found in multiple species
tggaagaagggcttattagtt

SEQ ID NO: 1466 - DNA, 21 bp, Unknown
  Found in multiple species
tgctggtatatcacatgcttc

SEQ ID NO: 1467 - DNA, 21 bp, Unknown
  Found in multiple species
tgctggatgtaatcgtaccac

SEQ ID NO: 1468 - DNA, 21 bp, Unknown
  Found in multiple species
tgctcctgatgtggtacgatt

SEQ ID NO: 1469 - DNA, 21 bp, Unknown
  Found in multiple species
tgcaattcaaacaatgttgga

SEQ ID NO: 1470 - DNA, 21 bp, Unknown
  Found in multiple species
tgatgtggtacgattacatcc

SEQ ID NO: 1471 - DNA, 21 bp, Unknown
  Found in multiple species
tgatggaagaagggcttatta

SEQ ID NO: 1472 - DNA, 21 bp, Unknown
  Found in multiple species
tgagcatatccgggaagattt

SEQ ID NO: 1473 - DNA, 21 bp, Unknown
  Found in multiple species
tgaagcatgtgatataccagc

SEQ ID NO: 1474 - DNA, 21 bp, Unknown
  Found in multiple species
tcttccgaaatcttcccggat

SEQ ID NO: 1475 - DNA, 21 bp, Unknown
  Found in multiple species
tcttcccggatatgctcaaat

SEQ ID NO: 1476 - DNA, 21 bp, Unknown
  Found in multiple species
tctgctggatgtaatcgtacc

SEQ ID NO: 1477 - DNA, 21 bp, Unknown
  Found in multiple species
tctcctctataaagatctcca

SEQ ID NO: 1478 - DNA, 21 bp, Unknown
  Found in multiple species
tctccaaccaactaataagcc

SEQ ID NO: 1479 - DNA, 21 bp, Unknown
  Found in multiple species
tctataaagatctccaaccaa

SEQ ID NO: 1480 - DNA, 21 bp, Unknown
  Found in multiple species
tcgtaccacatcaggagcatg

SEQ ID NO: 1481 - DNA, 21 bp, Unknown
  Found in multiple species
tcctggagtatccaacattgt

SEQ ID NO: 1482 - DNA, 21 bp, Unknown
  Found in multiple species
tcctgatgtggtacgattaca

SEQ ID NO: 1483 - DNA, 21 bp, Unknown
  Found in multiple species
tcctctataaagatctccaac

SEQ ID NO: 1484 - DNA, 21 bp, Unknown
  Found in multiple species
tccgggaagatttcggaagaa

SEQ ID NO: 1485 - DNA, 21 bp, Unknown
  Found in multiple species
tccgaaatcttcccggatatg

SEQ ID NO: 1486 - DNA, 21 bp, Unknown
  Found in multiple species
tcccgaggtatgtatgtgccc

SEQ ID NO: 1487 - DNA, 21 bp, Unknown
  Found in multiple species
tccaaccaactaataagccct

SEQ ID NO: 1488 - DNA, 21 bp, Unknown
  Found in multiple species
tccaacattgtttgaattgca

SEQ ID NO: 1489 - DNA, 21 bp, Unknown
  Found in multiple species
tcaaacaatgttggatactcc

SEQ ID NO: 1490 - DNA, 21 bp, Unknown
  Found in multiple species
tattagttggttggagatctt

SEQ ID NO: 1491 - DNA, 21 bp, Unknown
  Found in multiple species
tatctttctaggttgcctaaa

SEQ ID NO: 1492 - DNA, 21 bp, Unknown
  Found in multiple species
tatctgctggatgtaatcgta

SEQ ID NO: 1493 - DNA, 21 bp, Unknown
  Found in multiple species
tatcctcaacatctaacacca

SEQ ID NO: 1494 - DNA, 21 bp, Unknown
  Found in multiple species
tatccgggaagatttcggaag

SEQ ID NO: 1495 - DNA, 21 bp, Unknown
  Found in multiple species
tatccaacattgtttgaattg

SEQ ID NO: 1496 - DNA, 21 bp, Unknown
  Found in multiple species
tataaagatctccaaccaact

SEQ ID NO: 1497 - DNA, 21 bp, Unknown
  Found in multiple species
tagttggttggagatctttat

SEQ ID NO: 1498 - DNA, 21 bp, Unknown
  Found in multiple species
taggcaacctagaaagatacc

SEQ ID NO: 1499 - DNA, 21 bp, Unknown
  Found in multiple species
tagctaattctggtagacctg

SEQ ID NO: 1500 - DNA, 21 bp, Unknown
  Found in multiple species
tagaattgttaaggaagcttt

SEQ ID NO: 1501 - DNA, 21 bp, Unknown
  Found in multiple species
tacgattacatccagcagata

SEQ ID NO: 1502 - DNA, 21 bp, Unknown
  Found in multiple species
taccacatcaggagcatgtgc

SEQ ID NO: 1503 - DNA, 21 bp, Unknown
  Found in multiple species
taccaaggtgagcgatttaag

SEQ ID NO: 1504 - DNA, 21 bp, Unknown
  Found in multiple species
tacatacctcgggaatccttc

SEQ ID NO: 1505 - DNA, 21 bp, Unknown
  Found in multiple species
taatcgtaccacatcaggagc

SEQ ID NO: 1506 - DNA, 21 bp, Unknown
  Found in multiple species
taataagcccttcttccatca

SEQ ID NO: 1507 - DNA, 21 bp, Unknown
  Found in multiple species
taagcccttcttccatcaccc

SEQ ID NO: 1508 - DNA, 21 bp, Unknown
  Found in multiple species
taaatcgctcaccttggtaac

SEQ ID NO: 1509 - DNA, 21 bp, Unknown
  Found in multiple species
taaagatctccaaccaactaa

SEQ ID NO: 1510 - DNA, 21 bp, Unknown
  Found in multiple species
gtttaggcaacctagaaagat

SEQ ID NO: 1511 - DNA, 21 bp, Unknown
  Found in multiple species
gttggttggagatctttatag

SEQ ID NO: 1512 - DNA, 21 bp, Unknown
  Found in multiple species
gttggagatctttatagagga

SEQ ID NO: 1513 - DNA, 21 bp, Unknown
  Found in multiple species
gttaccaaggtgagcgattta

SEQ ID NO: 1514 - DNA, 21 bp, Unknown
  Found in multiple species
gtgttaccaaggtgagcgatt

SEQ ID NO: 1515 - DNA, 21 bp, Unknown
  Found in multiple species
gtggtacgattacatccagca

SEQ ID NO: 1516 - DNA, 21 bp, Unknown
  Found in multiple species
gtgggtatctttctaggttgc

SEQ ID NO: 1517 - DNA, 21 bp, Unknown
  Found in multiple species
gtgatggaagaagggcttatt

SEQ ID NO: 1518 - DNA, 21 bp, Unknown
  Found in multiple species
gtcctggagtatccaacattg

SEQ ID NO: 1519 - DNA, 21 bp, Unknown
  Found in multiple species
gtatctttctaggttgcctaa

SEQ ID NO: 1520 - DNA, 21 bp, Unknown
  Found in multiple species
gtatccaacattgtttgaatt

SEQ ID NO: 1521 - DNA, 21 bp, Unknown
  Found in multiple species
gtacgattacatccagcagat

SEQ ID NO: 1522 - DNA, 21 bp, Unknown
  Found in multiple species
gtaccacatcaggagcatgtg

SEQ ID NO: 1523 - DNA, 21 bp, Unknown
  Found in multiple species
gtaatcgtaccacatcaggag

SEQ ID NO: 1524 - DNA, 21 bp, Unknown
  Found in multiple species
ggttggagatctttatagagg

SEQ ID NO: 1525 - DNA, 21 bp, Unknown
  Found in multiple species
ggtgttagatgttgaggatat

SEQ ID NO: 1526 - DNA, 21 bp, Unknown
  Found in multiple species
ggtgggtatctttctaggttg

SEQ ID NO: 1527 - DNA, 21 bp, Unknown
  Found in multiple species
ggtgatggaagaagggcttat

SEQ ID NO: 1528 - DNA, 21 bp, Unknown
  Found in multiple species
ggtcctggagtatccaacatt

SEQ ID NO: 1529 - DNA, 21 bp, Unknown
  Found in multiple species
ggtatctttctaggttgccta

SEQ ID NO: 1530 - DNA, 21 bp, Unknown
  Found in multiple species
ggtacgattacatccagcaga

SEQ ID NO: 1531 - DNA, 21 bp, Unknown
  Found in multiple species
gggtgatggaagaagggctta

SEQ ID NO: 1532 - DNA, 21 bp, Unknown
  Found in multiple species
gggtatctttctaggttgcct

SEQ ID NO: 1533 - DNA, 21 bp, Unknown
  Found in multiple species
gggcttattagttggttggag

SEQ ID NO: 1534 - DNA, 21 bp, Unknown
  Found in multiple species
gggcacatacatacctcggga

SEQ ID NO: 1535 - DNA, 21 bp, Unknown
  Found in multiple species
ggcttattagttggttggaga

SEQ ID NO: 1536 - DNA, 21 bp, Unknown
  Found in multiple species
ggcagcacatgctcctgatgt

SEQ ID NO: 1537 - DNA, 21 bp, Unknown
  Found in multiple species
ggcacatacatacctcgggaa

SEQ ID NO: 1538 - DNA, 21 bp, Unknown
  Found in multiple species
ggcaacctagaaagataccca

SEQ ID NO: 1539 - DNA, 21 bp, Unknown
  Found in multiple species
ggattcccgaggtatgtatgt

SEQ ID NO: 1540 - DNA, 21 bp, Unknown
  Found in multiple species
ggatgtaatcgtaccacatca

SEQ ID NO: 1541 - DNA, 21 bp, Unknown
  Found in multiple species
ggagtatccaacattgtttga

SEQ ID NO: 1542 - DNA, 21 bp, Unknown
  Found in multiple species
ggagatctttatagaggagaa

SEQ ID NO: 1543 - DNA, 21 bp, Unknown
  Found in multiple species
ggaagaagggcttattagttg

SEQ ID NO: 1544 - DNA, 21 bp, Unknown
  Found in multiple species
gcttattagttggttggagat

SEQ ID NO: 1545 - DNA, 21 bp, Unknown
  Found in multiple species
gctggtatatcacatgcttca

SEQ ID NO: 1546 - DNA, 21 bp, Unknown
  Found in multiple species
gctggatgtaatcgtaccaca

SEQ ID NO: 1547 - DNA, 21 bp, Unknown
  Found in multiple species
gctgctggtatatcacatgct

SEQ ID NO: 1548 - DNA, 21 bp, Unknown
  Found in multiple species
gctgaagcatgtgatatacca

SEQ ID NO: 1549 - DNA, 21 bp, Unknown
  Found in multiple species
gctcctgatgtggtacgatta

SEQ ID NO: 1550 - DNA, 21 bp, Unknown
  Found in multiple species
gcatatccgggaagatttcgg

SEQ ID NO: 1551 - DNA, 21 bp, Unknown
  Found in multiple species
gcagcacatgctcctgatgtg

SEQ ID NO: 1552 - DNA, 21 bp, Unknown
  Found in multiple species
gcacatgctcctgatgtggta

SEQ ID NO: 1553 - DNA, 21 bp, Unknown
  Found in multiple species
gcacatacatacctcgggaat

SEQ ID NO: 1554 - DNA, 21 bp, Unknown
  Found in multiple species
gcaattcaaacaatgttggat

SEQ ID NO: 1555 - DNA, 21 bp, Unknown
  Found in multiple species
gcaacctagaaagatacccac

SEQ ID NO: 1556 - DNA, 21 bp, Unknown
  Found in multiple species
gattcccgaggtatgtatgtg

SEQ ID NO: 1557 - DNA, 21 bp, Unknown
  Found in multiple species
gatgtggtacgattacatcca

SEQ ID NO: 1558 - DNA, 21 bp, Unknown
  Found in multiple species
gatgtaatcgtaccacatcag

SEQ ID NO: 1559 - DNA, 21 bp, Unknown
  Found in multiple species
gatggaagaagggcttattag

SEQ ID NO: 1560 - DNA, 21 bp, Unknown
  Found in multiple species
gatctccaaccaactaataag

SEQ ID NO: 1561 - DNA, 21 bp, Unknown
  Found in multiple species
gagtatccaacattgtttgaa

SEQ ID NO: 1562 - DNA, 21 bp, Unknown
  Found in multiple species
gagggtgatggaagaagggct

SEQ ID NO: 1563 - DNA, 21 bp, Unknown
  Found in multiple species
gagcatatccgggaagatttc

SEQ ID NO: 1564 - DNA, 21 bp, Unknown
  Found in multiple species
gaattgttaaggaagctttct

SEQ ID NO: 1565 - DNA, 21 bp, Unknown
  Found in multiple species
gaagggcttattagttggttg

SEQ ID NO: 1566 - DNA, 21 bp, Unknown
  Found in multiple species
gaaggattcccgaggtatgta

SEQ ID NO: 1567 - DNA, 21 bp, Unknown
  Found in multiple species
gaagcatgtgatataccagca

SEQ ID NO: 1568 - DNA, 21 bp, Unknown
  Found in multiple species
gaagaagggcttattagttgg

SEQ ID NO: 1569 - DNA, 21 bp, Unknown
  Found in multiple species
gaaatcttcccggatatgctc

SEQ ID NO: 1570 - DNA, 21 bp, Unknown
  Found in multiple species
gaaagcttccttaacaattct

SEQ ID NO: 1571 - DNA, 21 bp, Unknown
  Found in multiple species
cttccgaaatcttcccggata

SEQ ID NO: 1572 - DNA, 21 bp, Unknown
  Found in multiple species
cttcccggatatgctcaaatt

SEQ ID NO: 1573 - DNA, 21 bp, Unknown
  Found in multiple species
cttattagttggttggagatc

SEQ ID NO: 1574 - DNA, 21 bp, Unknown
  Found in multiple species
cttaaatcgctcaccttggta

SEQ ID NO: 1575 - DNA, 21 bp, Unknown
  Found in multiple species
ctggtatatcacatgcttcag

SEQ ID NO: 1576 - DNA, 21 bp, Unknown
  Found in multiple species
ctggatgtaatcgtaccacat

SEQ ID NO: 1577 - DNA, 21 bp, Unknown
  Found in multiple species
ctggagtatccaacattgttt

SEQ ID NO: 1578 - DNA, 21 bp, Unknown
  Found in multiple species
ctgctggtatatcacatgctt

SEQ ID NO: 1579 - DNA, 21 bp, Unknown
  Found in multiple species
ctgctggatgtaatcgtacca

SEQ ID NO: 1580 - DNA, 21 bp, Unknown
  Found in multiple species
ctgcaattcaaacaatgttgg

SEQ ID NO: 1581 - DNA, 21 bp, Unknown
  Found in multiple species
ctgatgtggtacgattacatc

SEQ ID NO: 1582 - DNA, 21 bp, Unknown
  Found in multiple species
ctgaagcatgtgatataccag

SEQ ID NO: 1583 - DNA, 21 bp, Unknown
  Found in multiple species
ctctataaagatctccaacca

SEQ ID NO: 1584 - DNA, 21 bp, Unknown
  Found in multiple species
ctcctgatgtggtacgattac

SEQ ID NO: 1585 - DNA, 21 bp, Unknown
  Found in multiple species
ctcctctataaagatctccaa

SEQ ID NO: 1586 - DNA, 21 bp, Unknown
  Found in multiple species
ctccaaccaactaataagccc

SEQ ID NO: 1587 - DNA, 21 bp, Unknown
  Found in multiple species
ctataaagatctccaaccaac

SEQ ID NO: 1588 - DNA, 21 bp, Unknown
  Found in multiple species
ctagaattgttaaggaagctt

SEQ ID NO: 1589 - DNA, 21 bp, Unknown
  Found in multiple species
ctaataagcccttcttccatc

SEQ ID NO: 1590 - DNA, 21 bp, Unknown
  Found in multiple species
cgtgttaccaaggtgagcgat

SEQ ID NO: 1591 - DNA, 21 bp, Unknown
  Found in multiple species
cgtaccacatcaggagcatgt

SEQ ID NO: 1592 - DNA, 21 bp, Unknown
  Found in multiple species
cgggcacatacatacctcggg

SEQ ID NO: 1593 - DNA, 21 bp, Unknown
  Found in multiple species
cgggaagatttcggaagaatt

SEQ ID NO: 1594 - DNA, 21 bp, Unknown
  Found in multiple species
cgaaatcttcccggatatgct

SEQ ID NO: 1595 - DNA, 21 bp, Unknown
  Found in multiple species
ccttaaatcgctcaccttggt

SEQ ID NO: 1596 - DNA, 21 bp, Unknown
  Found in multiple species
cctggagtatccaacattgtt

SEQ ID NO: 1597 - DNA, 21 bp, Unknown
  Found in multiple species
cctgatgtggtacgattacat

SEQ ID NO: 1598 - DNA, 21 bp, Unknown
  Found in multiple species
cctctataaagatctccaacc

SEQ ID NO: 1599 - DNA, 21 bp, Unknown
  Found in multiple species
cctagaattgttaaggaagct

SEQ ID NO: 1600 - DNA, 21 bp, Unknown
  Found in multiple species
ccgggaagatttcggaagaat

SEQ ID NO: 1601 - DNA, 21 bp, Unknown
  Found in multiple species
ccgaaatcttcccggatatgc

SEQ ID NO: 1602 - DNA, 21 bp, Unknown
  Found in multiple species
cccgaggtatgtatgtgcccg

SEQ ID NO: 1603 - DNA, 21 bp, Unknown
  Found in multiple species
ccaggtctaccagaattagct

SEQ ID NO: 1604 - DNA, 21 bp, Unknown
  Found in multiple species
ccacatcaggagcatgtgctg

SEQ ID NO: 1605 - DNA, 21 bp, Unknown
  Found in multiple species
ccaactaataagcccttcttc

SEQ ID NO: 1606 - DNA, 21 bp, Unknown
  Found in multiple species
ccaaccaactaataagccctt

SEQ ID NO: 1607 - DNA, 21 bp, Unknown
  Found in multiple species
ccaacattgtttgaattgcag

SEQ ID NO: 1608 - DNA, 21 bp, Unknown
  Found in multiple species
catgctcctgatgtggtacga

SEQ ID NO: 1609 - DNA, 21 bp, Unknown
  Found in multiple species
catatccgggaagatttcgga

SEQ ID NO: 1610 - DNA, 21 bp, Unknown
  Found in multiple species
catacatacctcgggaatcct

SEQ ID NO: 1611 - DNA, 21 bp, Unknown
  Found in multiple species
caggtctaccagaattagcta

SEQ ID NO: 1612 - DNA, 21 bp, Unknown
  Found in multiple species
cagcacatgctcctgatgtgg

SEQ ID NO: 1613 - DNA, 21 bp, Unknown
  Found in multiple species
cacatgctcctgatgtggtac

SEQ ID NO: 1614 - DNA, 21 bp, Unknown
  Found in multiple species
cacatcaggagcatgtgctgc

SEQ ID NO: 1615 - DNA, 21 bp, Unknown
  Found in multiple species
cacatacatacctcgggaatc

SEQ ID NO: 1616 - DNA, 21 bp, Unknown
  Found in multiple species
caattcaaacaatgttggata

SEQ ID NO: 1617 - DNA, 21 bp, Unknown
  Found in multiple species
caatgttggatactccaggac

SEQ ID NO: 1618 - DNA, 21 bp, Unknown
  Found in multiple species
caactaataagcccttcttcc

SEQ ID NO: 1619 - DNA, 21 bp, Unknown
  Found in multiple species
caacctagaaagatacccacc

SEQ ID NO: 1620 - DNA, 21 bp, Unknown
  Found in multiple species
caaccaactaataagcccttc

SEQ ID NO: 1621 - DNA, 21 bp, Unknown
  Found in multiple species
caaacaatgttggatactcca

SEQ ID NO: 1622 - DNA, 21 bp, Unknown
  Found in multiple species
atttgagcatatccgggaaga

SEQ ID NO: 1623 - DNA, 21 bp, Unknown
  Found in multiple species
attcttccgaaatcttcccgg

SEQ ID NO: 1624 - DNA, 21 bp, Unknown
  Found in multiple species
attcccgaggtatgtatgtgc

SEQ ID NO: 1625 - DNA, 21 bp, Unknown
  Found in multiple species
attcaaacaatgttggatact

SEQ ID NO: 1626 - DNA, 21 bp, Unknown
  Found in multiple species
attagttggttggagatcttt

SEQ ID NO: 1627 - DNA, 21 bp, Unknown
  Found in multiple species
atgtggtacgattacatccag

SEQ ID NO: 1628 - DNA, 21 bp, Unknown
  Found in multiple species
atgtaatcgtaccacatcagg

SEQ ID NO: 1629 - DNA, 21 bp, Unknown
  Found in multiple species
atggaagaagggcttattagt

SEQ ID NO: 1630 - DNA, 21 bp, Unknown
  Found in multiple species
atgctcctgatgtggtacgat

SEQ ID NO: 1631 - DNA, 21 bp, Unknown
  Found in multiple species
atctttctaggttgcctaaac

SEQ ID NO: 1632 - DNA, 21 bp, Unknown
  Found in multiple species
atcttcccggatatgctcaaa

SEQ ID NO: 1633 - DNA, 21 bp, Unknown
  Found in multiple species
atctgctggatgtaatcgtac

SEQ ID NO: 1634 - DNA, 21 bp, Unknown
  Found in multiple species
atctccaaccaactaataagc

SEQ ID NO: 1635 - DNA, 21 bp, Unknown
  Found in multiple species
atcgtaccacatcaggagcat

SEQ ID NO: 1636 - DNA, 21 bp, Unknown
  Found in multiple species
atcgctcaccttggtaacacg

SEQ ID NO: 1637 - DNA, 21 bp, Unknown
  Found in multiple species
atccgggaagatttcggaaga

SEQ ID NO: 1638 - DNA, 21 bp, Unknown
  Found in multiple species
atccaacattgtttgaattgc

SEQ ID NO: 1639 - DNA, 21 bp, Unknown
  Found in multiple species
atatcctcaacatctaacacc

SEQ ID NO: 1640 - DNA, 21 bp, Unknown
  Found in multiple species
atatccgggaagatttcggaa

SEQ ID NO: 1641 - DNA, 21 bp, Unknown
  Found in multiple species
atacatacctcgggaatcctt

SEQ ID NO: 1642 - DNA, 21 bp, Unknown
  Found in multiple species
ataagcccttcttccatcacc

SEQ ID NO: 1643 - DNA, 21 bp, Unknown
  Found in multiple species
ataaagatctccaaccaacta

SEQ ID NO: 1644 - DNA, 21 bp, Unknown
  Found in multiple species
agttggttggagatctttata

SEQ ID NO: 1645 - DNA, 21 bp, Unknown
  Found in multiple species
agtatccaacattgtttgaat

SEQ ID NO: 1646 - DNA, 21 bp, Unknown
  Found in multiple species
aggtctaccagaattagctaa

SEQ ID NO: 1647 - DNA, 21 bp, Unknown
  Found in multiple species
agggtgatggaagaagggctt

SEQ ID NO: 1648 - DNA, 21 bp, Unknown
  Found in multiple species
agggcttattagttggttgga

SEQ ID NO: 1649 - DNA, 21 bp, Unknown
  Found in multiple species
aggcaacctagaaagataccc

SEQ ID NO: 1650 - DNA, 21 bp, Unknown
  Found in multiple species
aggattcccgaggtatgtatg

SEQ ID NO: 1651 - DNA, 21 bp, Unknown
  Found in multiple species
agcttccttaacaattctagg

SEQ ID NO: 1652 - DNA, 21 bp, Unknown
  Found in multiple species
agctaattctggtagacctgg

SEQ ID NO: 1653 - DNA, 21 bp, Unknown
  Found in multiple species
agcccttcttccatcaccctc

SEQ ID NO: 1654 - DNA, 21 bp, Unknown
  Found in multiple species
agcatgtgatataccagcagc

SEQ ID NO: 1655 - DNA, 21 bp, Unknown
  Found in multiple species
agcatatccgggaagatttcg

SEQ ID NO: 1656 - DNA, 21 bp, Unknown
  Found in multiple species
agcacatgctcctgatgtggt

SEQ ID NO: 1657 - DNA, 21 bp, Unknown
  Found in multiple species
agatctccaaccaactaataa

SEQ ID NO: 1658 - DNA, 21 bp, Unknown
  Found in multiple species
agaattgttaaggaagctttc

SEQ ID NO: 1659 - DNA, 21 bp, Unknown
  Found in multiple species
agaagggcttattagttggtt

SEQ ID NO: 1660 - DNA, 21 bp, Unknown
  Found in multiple species
agaaagcttccttaacaattc

SEQ ID NO: 1661 - DNA, 21 bp, Unknown
  Found in multiple species
actaataagcccttcttccat

SEQ ID NO: 1662 - DNA, 21 bp, Unknown
  Found in multiple species
accacatcaggagcatgtgct

SEQ ID NO: 1663 - DNA, 21 bp, Unknown
  Found in multiple species
accaaggtgagcgatttaagg

SEQ ID NO: 1664 - DNA, 21 bp, Unknown
  Found in multiple species
accaactaataagcccttctt

SEQ ID NO: 1665 - DNA, 21 bp, Unknown
  Found in multiple species
acatgctcctgatgtggtacg

SEQ ID NO: 1666 - DNA, 21 bp, Unknown
  Found in multiple species
acatcaggagcatgtgctgcc

SEQ ID NO: 1667 - DNA, 21 bp, Unknown
  Found in multiple species
acatacatacctcgggaatcc

SEQ ID NO: 1668 - DNA, 21 bp, Unknown
  Found in multiple species
acaatgttggatactccagga

SEQ ID NO: 1669 - DNA, 21 bp, Unknown
  Found in multiple species
aatttgagcatatccgggaag

SEQ ID NO: 1670 - DNA, 21 bp, Unknown
  Found in multiple species
aattcttccgaaatcttcccg

SEQ ID NO: 1671 - DNA, 21 bp, Unknown
  Found in multiple species
aattcaaacaatgttggatac

SEQ ID NO: 1672 - DNA, 21 bp, Unknown
  Found in multiple species
aatgttggatactccaggacc

SEQ ID NO: 1673 - DNA, 21 bp, Unknown
  Found in multiple species
aatcttcccggatatgctcaa

SEQ ID NO: 1674 - DNA, 21 bp, Unknown
  Found in multiple species
aatcgtaccacatcaggagca

SEQ ID NO: 1675 - DNA, 21 bp, Unknown
  Found in multiple species
aatcgctcaccttggtaacac

SEQ ID NO: 1676 - DNA, 21 bp, Unknown
  Found in multiple species
aataagcccttcttccatcac

SEQ ID NO: 1677 - DNA, 21 bp, Unknown
  Found in multiple species
aagggcttattagttggttgg

SEQ ID NO: 1678 - DNA, 21 bp, Unknown
  Found in multiple species
aaggattcccgaggtatgtat

SEQ ID NO: 1679 - DNA, 21 bp, Unknown
  Found in multiple species
aagcttccttaacaattctag

SEQ ID NO: 1680 - DNA, 21 bp, Unknown
  Found in multiple species
aagcccttcttccatcaccct

SEQ ID NO: 1681 - DNA, 21 bp, Unknown
  Found in multiple species
aagcatgtgatataccagcag

SEQ ID NO: 1682 - DNA, 21 bp, Unknown
  Found in multiple species
aagatctccaaccaactaata

SEQ ID NO: 1683 - DNA, 21 bp, Unknown
  Found in multiple species
aagaagggcttattagttggt

SEQ ID NO: 1684 - DNA, 21 bp, Unknown
  Found in multiple species
aactaataagcccttcttcca

SEQ ID NO: 1685 - DNA, 21 bp, Unknown
  Found in multiple species
aaccaactaataagcccttct

SEQ ID NO: 1686 - DNA, 21 bp, Unknown
  Found in multiple species
aacaatgttggatactccagg

SEQ ID NO: 1687 - DNA, 21 bp, Unknown
  Found in multiple species
aaatcttcccggatatgctca

SEQ ID NO: 1688 - DNA, 21 bp, Unknown
  Found in multiple species
aaatcgctcaccttggtaaca

SEQ ID NO: 1689 - DNA, 21 bp, Unknown
  Found in multiple species
aaagcttccttaacaattcta

SEQ ID NO: 1690 - DNA, 21 bp, Unknown
  Found in multiple species
aaagatctccaaccaactaat

SEQ ID NO: 1691 - DNA, 21 bp, Unknown
  Found in multiple species
aaacaatgttggatactccag

SEQ ID NO: 1692 - DNA, 1599 bp, Abutilon theophrasti
catggcggctctctcgactcctcgcctaccagttcactgcttgaagcccgagtcagactcagctcggagacccatttctttccctgtaaagatacgaagacccatcagccatgtccccaagaaactcgtgctttctcccaggagcgtcgacgataagatctctggcaacaacatcctttccaacggccccgttccttcaactcccactcgttcaaaggtgagaaggcatacgatttctgtgtttgttggagatgaaagtggaatgatcaataggattgctggagtttttgcaaggagagggtataacattgagtcccttgcggttggtttgaacaaagataaggcactcttcaccatagttgtctctggtactgaaagagtgcttcagcaagttgtggagcagttacaaaagcttgtgaatgtttggaaggttgaagatctctctaatgagcctcaggttgaacgtgagcttatgctgataaaagtgaatgcggatccaaagtttagagctgagatcatgtggttagtggacatcttcagggcaaagattgtggacatctcagaacactcactaactattgaggtaacaggagatcctgggaagatggttgctgtgcaaagaaatttaagcaagtttgggatcaaagaaattgctagaacaggaaagattgcccttagaagggaaaaaatgggtgcatctgctccattctggcaattttcagcagcttcatatcctgatcttgaagaaacaatacctgataacactcttgcaggggccagagatagaacagtagttagcgaggctgatgtttctggagggggggatgtttatccagtggagtcacctgatggttttacgatcaatcaagttcttgatgctcattggggtgttctcgttgatgatacaagtggacatcaatctcatactttatccatgcttgtaaatgactgtccgggagttctaaaccttgtcacaggtgttttcgctcgaagaggctataatcttcagagtttggctgttggacatgcagaagttgaggggcgctctcgcattaccactgttgttccgggtacagatgaatcaattagcaagttagtgcagcaactatataagctcgtagatatgcatgaggtacaagatcttacacccctgccatttgctgaacgagaattaatgttgataaagattgccgtgaatgccgctgctcggcgagatgtccttgacattgccaccatttttagggccaaggctgttgatgtttcggaccacactgtcactctcgagcttacaggagatctagacaagatggttgcgctgcagagattgttggagccttatggtatttgtgaggttgctcgaactggacgtgtagcgttggtgagagagtctggtgtcgactccaaatatctacgaggatattcttttccactttaagttccaagtagtatttctaaggtattggtgtgagactatttttgcgttgttttgttttgattaccaaacagataagtttagatacttcagagctttgataatcataaagttttgggaagtttgaataatcaaagctccactgaaatatattcttgttatgtgta

SEQ ID NO: 1693 - DNA, 714 bp, Amaranthus graecizans
actcgctgttggattgaacaaggacaaagctctctttactattgtagtttctggaacggataatgtgttgcagcaagtgatggaacaacttcaaaagcttgtcaatgttttgaaggttgaagatatatccaaggagcctcaagtagaacgtgaattgatgcttgtaaaagttggagctgatcggaataaccgtgctgagttgatgtggttggtgggcatctttcgtgccaaaatagtggacatatcggaagagtatctttcaatagaggtcactggagatccaggaaagatggttgctgtcctcagaaacctaagcaagtttggcatcaaagaaattgctcgtaccggaaagattgctctaagaagggaaaaattgggtgagtctgctcctttctggcgtttttctgctgcttcttatcctgatcttgaagaagctatccctatggatgctctttctggagtttcaaaaagagcagctgctgctggatcatcagattcgtctgtggagggtgatgtttatcctgtggagccgtttgatggtttctcccctccaatcttagatgctcattggggtattttgaatgaagaagatactagtgggatgcgatcacacactctatctattcttgtcaatgacaaacccggggtccttaatgttgttacgggggtttttgctcgaaggggttataacattcagagtttagctgtgggtca

SEQ ID NO: 1694 - DNA, 632 bp, Amaranthus hybridus
gtgtcgactcacctttcaacgagttttaactccattccgaaaagcaatagattgaaccaccaaactgcaaacgattagggttctccttgaaaccccattctctgggttttaagtttaactccaatagtgacaggaattcggagtttgataaactggttgtatctgcaagcaatgttgatcaactgggaaatcaaagtaacttatcctttaatcccccttctccctctcgatcaaaggagagacgacatacaatatcagtatttgtgggggatgaaagtggaatgattaatcgaatagcaggggtttttgccagaagaggttataatatcgaatcactcgctgttggattgaacaaggacaaagctctcttcactattgtagtttctggaacggataatgtgttgcagcaagtgatggaacagcttcaaaagcttgtcaatgttttgaaggttgaagatatatccaaggagcctcaagtagaacgtgaattgatgcttgtaaaagttggagctgatcggaataaccgtgctgagctgatgtggttggtggacatctttcgtgccaaaattgtggacatatcggaagagtatctttcaatagaggtcactggagatccaggaaagatggttgct

SEQ ID NO: 1695 - DNA, 495 bp, Amaranthus hybridus
aaagaaattgcaaggaccggtaagattgctctaaggcgagaaagatgggtcagacggctcctttttggagattctctgctgcttcttatccagatctacaagaaaaggctgttgatgatctggccaggcctacgaaacggagcatcaatggtgattctggctcatcttcaagtggtgatgtttatccggtggaaccttatgatggttcgatggtaaatcaagtacttgatgctcactggggcgtactttatgacggtgattccagtggtctccggtcacatacgctgtccatgctggtaaataatgctcccggagttcttaacactgttacaggagtaatttctcgtaggggttataacattcagagtcttgctgtaggccctgctgaaaaggagggtctttctcgtatcacaactgtcattcctggaaacgacgagtcgattggaaaattggttcagcaattcaacaagttagtagaccttcatgagattcagg

SEQ ID NO: 1696 - DNA, 1326 bp, Amaranthus lividus
gcaatagattgaaccaccaaactgcaaaacgattagggttctccttgaaaccccattctctgggttttaagtttaactccaatagtgacaggaattcggagtttgataaactggttgtgtctgcaagcaatgttgatcaactgggaaatcaaagtaacttatcctttaatcccccttctccctctcgatcaaaggagagacgacatacaatatcagtatttgtgggggatgaaagtggaatgattaatcgaatagcaggggtttttgccagaagaggttataatatcgaatcactcgctgttggattgaacaaggacaaagctctcttcactattgtagtttctggaacggataatgtgttgcagcaagtgatggaacagcttcaaaagcttgtcaatgttttgaaggttgaagatatatccaaggagcctcaagtagaacgtgaattgatgcttgtaaaagttggagctgatcggaataaccgtgctgagctgatgtggttggtggacatctttcgtgccaaaattgtggacatatcggaagagtatctttcaatagaggtcactggagatccaggaaagatggttgctgtccttagaaacctaagcaagtttggcatcaaagaaattgctcgtaccggaaagattgctctaagaagggaaaaattgggcgagtctgctcctttctggcgtttttctgctgtttcttatcctgatcttgaagaagctatccctatggatgctctttctggagtttcaaaaggggcagctgctgctggatcatcggatttgtctgtggagggtgatgtttatcctgtggagccgtttgatggtttctcccttccaatcttagatgctcattggggtattttgaacgaagaagatactagtgggatgcggtcacacactctatctattcttgttaatgacaaacctggggtccttaatgttgttacgggggtttttgctcgaaggggttataacattcagagtttagctgtgggtcatgcggaaggtgagggtctatctcgtatcactactgttgtacccggtacagatgaatcaattagcaaattggttcaacaaatctacaagctggttgatattcatgaggttagagatcttacccattatccatttgctgagcgagagttgatgttgataaaagtagctgtgaatactgctgcacgtcgtgaggtcctagacgttgccagcatttttagagcaaaagctgttgatgtatctgatcacaccataacacttgagctcactggagatttgaacaagatggttgctctacagagattgctcgaaccgtatggaatct

SEQ ID NO: 1697 - DNA, 621 bp, Amaranthus lividus
ctggaaatgacgagtcgattggaaaattagttcagcaatttaacaagttagtagaccttcatgagattcaagaccttactcaccagccatttcagagcgagagcttatgttgatcaaaatagctgcaaatactacagccaggagagatgtccttgatattgctaatattttccgtgcaaaagctgtggatgtttctgatcatacaataacattacaacttgctggtgatttagacaaaatggttgcgctacagagattattggagccttacggcatttgtgaggtggcacggactggaagagtagcactaacgagagagtctagggtagattccaaatatctacgaggatacactcttccgttgtatgaatgaaaaactccagctatgtctttccgacattaccttgtctgattccttccgctcttctacactgcattgcaagcagaacaattgcccacaagtggagtaaattaaaaggggaaacaacaataccgatctttgctttgaagatatactgatttgtataacaatagagtttgtatttgactagtatttatttgctcaacgctgtaataacatatccccttgaggtttgatatatggaaggaaaaattacccag

SEQ ID NO: 1698 - DNA, 509 bp, Amaranthus lividus
ttcatttgtttctcatctctctccaatggcggccatttcctttaacatcaatggcggaaagattggaactttatgtccaaaacctaaatatggttgtgcgtttttgagaaaatgggattttggagctcatacaactgtatatactaaacccatgtcaaaaatttcaagcctgaaagcagttgaagtttctaccaatgctacagaaaacgcagtttctctttcagctaactctagggtgatgcatcacacaatttctgtctttgtcggggatgaaagtggaataatcaataggattgcaggtgttatttctagaagaggatataatatcgagtctttggctgtttgtttaaacaaggataaggctctttttactatagaagtgtgtggaactgacaaggtgttgcgccaagtcgtggaacagcttaacaagcttgttagtgttttgaaggttgaagatctatcgagagagccacaagtggaacgtgaactgatgcttgtaaagcttaatt

SEQ ID NO: 1699 - DNA, 1678 bp, Amaranthus palmeri
aaatttccatccatggaggctgtgtcgactcacctttcaacgagttttaactccatttcgaaaagcaatagattcaaccgccaaactgcaaaacgattagggttcaccttgaaaccccattctctgtgttttaagtttaactccaatgatgacaggaattcggagtttgataaactggttgtatctgcaagcaatgttgatcaactgggaaatcaaagtaacttatcctttaatcccccttcttcctctcgatcaaaggagagacgacatacaatatcagtatttgtgggggatgaaagtggaatgattaatcgaatagcaggggtttttgccagaagaggttataatatcgaatcactcgctgttggattgaacaaggacaaagctctcttcactattgtagtttccggaacggataatgtgttgcagcaagtgatggaacagcttcaaaagcttgtcaatgttttgaaggttgaagatatatccaaggagcctcaagtagaacgtgaattgatgcttgtaaaagttggagctgatcggaataaccgtgctgagctgatgtggttggtggacatctttcgtgccaaaattgtggacatatcggaagagtatctttcaatagaggtcactggagatccaggaaagatggttgctgtccttagaaacctaagcaagtttggcatcaaagaaattgctcgtaccggaaagattgctctaagaagggaaaaattgggcgagtctgctcctttctggcgtttttctgctgcttcttatcctgatcttgaagaagctatccctatggatgctctttctggagtttcaaaagcagcaactgctgctggatcatcggattcgtctgtggagggtgatgtttatcctgtggagccgtttgatggtttctcccctccaatcttagatgctcattggggtattttgaatgaagaagatactagtgggatgcggtcacacactctatctattcttgtcaatgacaaacccggggtccttaatgttgttacgggggtttttgctcgaaggggttataacattcagagtttagctgtgggtcatgcggaaggtgagggtctatctcgtatcactactgttgtacccggtacagatgaatcaattagcaaattggttcaacaaatctacaagctggttgatattcatgaggttagagatcttacccattatccatttgctgagcgagagttgatgttgataaaagtagctgtgaatactgctgcacgtcgtgaggtcctagacgttgccagcatttttagagcaaaagctgttgatgtatctgatcacaccataacacttgagctcactggagatttgaacaagatggttgctctacagagattgctcgaaccgtatggaatctgtgaggttgcacgaacaggacgtgtggccttgagtcgagaatcaggtgtagactcgagataccttcgtggatactctttccctgtataagagttctgtcaaaacgtatgatgtaaaaagcctttgggattttttcttttcgaaattgtctccaatttttgatcctttgaagttgtgttcttgaagaatatttgcaagtttgttatgaaactttgtttaagtgaacaataattctctcatgagacggtctaatgtgtgagatctcttgttatattgggcttagtagccc

SEQ ID NO: 1700 - DNA, 1483 bp, Amaranthus palmeri
acatatgctaaaaacttcaaggtttaaagcaatggaagtttctgcaaatgcaacagtaaatatagttctgtttcagctcattctagggtgatgcgccacacaatttcagtctttgttggggatgaaagtgggataatcaataggattgcaggtgttatttctagaagaggatacaatatcgagtctttggctgtttgtttaaacaaggataaggctctttttactatagaagtgtgtggaactgacaaggtgttgcgccaagtcgtggaacagcttaacaagcttgttagtgttttgaaggttgaagatctatcgagagagccacaagtggaacgtgaactgatgcttgtaaagcttaattctgatgcaaattcccacgcagagctaatgtggctagtggacatcttcagggcaaaaattgtggatatctcagaaagcttggtcactgttgaggtgaccggagatcctggaaagttggctgctgtcctaagaaattttagaaagtttggaatcaaagaaattgcaaggaccggaaagattgctctaaggcgagaaaagatgggtcagacggctcctttttggagattctctgctgcttcttatccagatctacaagaaaaggctgttgatgctctggccaggcctacgaaacggagcatcaatggtgattctggctcatcttcaagtggtgatgtttatccggtggaaccttatgatggttcgatggttaatcaagtacttgatgctcactggggcgtactttatgacggtgattcaagtggtctccggtcacatacgctgtccatgctggtaaataatgttcccggagttcttaacactgttacaggagtaatttctcgtaggggttataacattcagagtcttgctgtaggccctgctgaaaaggagggtctttctcgtatcacaactgtcattcctggaaacgacgagtcgattggaaaattggttcagcaatttaacaagttaatagaccttcatgagattcaggatctactcaccagccattttcagagcgagagcttatgttgatcaaaatagctgcaaatactacagccaggagagatgtccttgatattgctaatatattccgtgcaaaacctgtggatgtttctgatcacacaataacattacaacttgccggtgatttagacaaaatggttgcgctacagagattattggagccttacggcatctgtgaggtggcacggactggaagagtagcactagctcgagagtctagggtagattccaagtatttacgaggatacactcttccgttgtatgaatgaaaaactccggctatgtctttccgacattaccttgtccgattccttccgctcttctacactgcactacgggcagaacaattgcccacgagtagagtaaactaaaaggagaagcaacaataccgatctttgctttgaagattgtataacaatagaactgtctcttatacacatct

SEQ ID NO: 1701 - DNA, 1480 bp, Amaranthus palmeri
acatatgctaaaaacttcaaggtttaaagcaatggaagtttctgcaaatgcaacagtaaatatagttctgtttcagctcattctagggtgatgcgccacacaatttcagtctttgttggggatgaaagtggtataatcaataggattgccggcgttatttctaggagaggatacaacatagagtctctggctgttggtttaaataaggataaggctctttttactatagtagtgtgtgggactgacaaggtgttgcgccaagtaatggagcagctcagcaagcttgttaatgtcttaaaggttgaagatctatctagagagcctcaagtggaacgtgaacttatgcttttaaagcttcattctaatgcagatacccatgctgagataatgtggttagtggacatcttcagggcaaaaattgtcgatatgtcggaaagcttcgttactgtagaggtgactggcgatcctggaaagatggctgctgtcctgagaaattttagcaagtatggaatcaaagaagttgccagaacaggaaagattgctctaagacgagaaaggatgggcgagacagctcctttttggagattctctgctgcatcttatccagatctagaagaaaaggctgttgaatcttttgtcaggcctgcaaaagaagcatcaatgctgatcctggctcatcgtctagtggtgatgtttatccagtggaaccttatgaagcctccataaatacagtacttgatgctcactggggagttctttacgaagatgattcaagcggacttgtgtcacatactctgtccatgctggtaaataatgctcctggagttctgaacaccgttacaggagtaattgctcgtagaggttataacattcagagtcttgctgtgggccctgctgaaaaggagggtctttctcgtatcacaactgttgttcctggaaacgacgagtcaattgcaaaattggttcagcaattaaacaaattagtagaccttcatgagattcaggaccttacgcaccagccatttgcagagcgagagcttatgttaattaaagtagcggcaaatacttcggccaggagagacgtccttgatattgctaatatattccgtgcaaaacctgtggatgtttctgatcacacaataacattacaacttgccggtgatttagacaaaatggttgcgctacagagattattggagccttacggcatctgtgaggtggcacggactggaagagtagcactagctcgagagtctagggtagattccaagtatttacgaggatacactcttccgttgtatgaatgaaaaactccggctatgtctttccgacattaccttgtccgattccttccgctcttctacactgcactacgggcagaacaattgcccacgagtagagtaaactaaaaggagaagcaacaataccgatctttgctttgaagattgtataacaatagaactgtctcttatacacatct

SEQ ID NO: 1702 - DNA, 9758 bp, Amaranthus palmeri
atggtaaatcatcactatgcggcctaatttgatgtggcctaatttgataaaaggatatttggtttttttttttaattttttttcttgttttaattattttattaaaatgactgatgattttaaatcaccattattgattaagatttaatataaatcacattgtaaaagcaacacaaaaagcacaaattcaataatatactctttaagtttgtttatcttctaattagttcggttaaaacggttccccactttcttctccgactctcacaattatcttcccctattcatttttcttccaccctctctaatggcggctgtttccttcaatatcaatggtggaaagattggaactttatgttcaagacacgaattcgtttgtgggtttgtaagaaaatttcattttagaactcatacttctatatttgaaaaacatatgccaaaaacttcaaggtttaaagcaatggaagtttctgcaaatgcaacagtaaatatagttcctgtttcagctcattctaggtaattttatttctcgaaaatttttgatttacaattaaattaatcttgttttgtaggtaatgaattgcagatgaaatagatggattcttatttgtttattggtatttgtttataaatttttgtttatattagtttctgaattgtgattattctgattgtatgtcaaggtttaggttgttactaaatgtaaattggattgattgaagttgcaataaggtgatggcgtgatgctgattgttgtaaatttttgtttatattagtatagtactacttattgacctaagttcttttacatagtaggagatattataacttttgcttgtggactcagggccggccctaagggtgggcaagaggggccgtctcccaatgcccatgtcaaaaaagcaaaattaatggttatataaggtttatataggttataaattgtaaaggaaaaggacgtcaatgtgtcatttctcccagggccccaaaatatctaggaccggtcctgaaagaaactactcaaaatttgtaggattttctattgagacatttttttttttgtggattaatgattgaactaagatcaaatagatactatttctgtttgattgaaacttttgggtagccggatgtgtaccggtgtgtgacttctttttgagttggttagttcaattgtattgttagaaatgatcttttctagggtctttggagacattggttctttacttttagtctatgaattatgatagtgttggtttaaacaccattttgttaccctattgtgattaagtgactcccagctcgattaaatttaggagttatattaatgttgtctttgttagttatattgatggtcggtagttcggttaagtttgtctatgaatacattgattttatccttatttggccaacaaatgtatgtaatttaggaaagttatatgatttaccactttgtatttgtatctctgttattttctttcttcttttcttgatgtgttggttggataaaaggaatttggagggaaagaaaggaaagagaaatagagggatgagactttgtcatatgtatatcaaatagagatgggaaatggaggggagggaataataacaatgaattccttctattttttttgaaaccaatccctccattattagaaagttttatattaaaaactcaccgctttccctcccctactccttcctttctagtctctcccccctcccacccttcaatagcttatcctttcatgccgtccaacaaaatttgaactcatatccttgtgtatgatcggagaaagtaatgactgaatcattcatgaagctcatccttggtgaatttatctctttttatccagtctttgagtctcgtggttcaggaacgctgccaaatctcttgaataaaagtcattttaaattatcatatgtatcacattctatgctgtttttttttcttgtattttgctatcattagaatggtaataaaatgtattttcattcttttccagggtgatgcgccacacaatttcagtctttgttggggatgaaagtggtataatcaataggattgccggcgttatttctaggagaggatacaacatagagtctctggctgttggtttaaataaggataaggctctttttactatagtagtgtgtgggactgacaaggtgttgcgccaagtaatggaacagctcagcaagcttgttaatgtcataaaggtagtcatctccttttttcttactttaaggtaactagtgatactttcatttagtagtggcggtcaatggtgattctaaccatgcatgttcatattgtttgtgcaatattgctcattttgagtctttgactttatcattgttgttaaactttgagagaatataatctcgagagcatctatcctcattttaagatagatagagcaggaaaacactcatgattctttaataaactttcaaaatattaaaattcccttgccctaatgcaattttatagctcccagctaatccgagttcaaggggttcgagtgtatgcaaccatactcatataacaacaaaatggttgattcagattgacccttaaaatcaaataccatcttgcaaattcacttaaacacatactttaacgacccgttttatagtagtccattaaaattcgaaagcaaagaattataaaatcttttattccatcgagaatagacacaataatcttcaaagcaatgtctataaaaagtttgtcgtgtcaccgtatcgtaacttaattgtaagggccttcaattttactgccatcaaaatataggttgagacccacaaaaccatttacatagacaagagccatttcactaccattatcataaccatgattgagaccgcatttgtgcacaatggtcaagtgacattcttcagcaatacttagagcttgaattggaggaatttgtataatgatctacttatgtaacaaattcttgataatgttgtcacatatagtggggagaaatttgaaggtcacaaagctaccacatgtaactgaatgcatctattgcagtcaaacctgatggcagacaactgtcaaggcagtcttttgtaaggaacctttagaaggtatcttttaaagaaaaaaaatttgtcgttagtttttaaaaaaagttaaaaattattttcttgaaaattttctttttaagtaaaataagtgtggtaaaatggacattatgttggaacttagaatttttagtaatagcttgttaattagcatgggaagtgattaatgaagttttatgtccattaggtaataatgtgtgaagtattcttatatgtattattgctgcactttccatttgatggtgcgcatcagggcatgcaatagtactttttttgatctaacatatatgtccttacttatgctatatgctcgcagctaagtattccttactaaaggtgttttacggggcgattcgactaacgggttaagggtcgggtcacattttaacgggtcatcaacggattaggttaataaagggtcgggccattaacgggccttggtgtaaagggttgggcagagccgggtcaaataattataggaattggttgcaacattttttttttccactttttgtttttatattttagatattatatacaaagttaggttgacccaatgggccataaagttgaataaaaaaaactattacatgaacctttaaaaacgggtcaaagtgggcctggtttaaacgagctttgacccgtcctgccccgttgaaatttgacatgaccctccccgcctcgccctatttaaatttagctccatcccggcccattgaacacatctattcctaaaataactaacattatgatggctcatcctattcgctaccatgcatgtaaatgtacacagtgtctatccgtttatccttttttatatccctgtataccatttgtgactaacggtattaattttttatcttccttgtaggttgaagatctatctagagagcctcaagtggaacgtgaacttatgctattaaagcttcattctaatgcggatacccatgctgaggtagttccacaagttcaaataattatatcctgaatgctatataattcatgaatcttttgttttcctcttagaatcatcagctacaagaaggtagataaagataagcaaatattcaaaaatatgctataacatcatgtgctttgtaagctttaaacttagagataacaaaaatacttaagaatacatcatgggtatgtagctgaagatcaaatgggaagttacattgcttctttgtgtgtattgtaaacaatctggtatcgtataagtccaaattccattttttgattttcagataatgtggttagtggacatcttcagggcaaaaattgtcgatatgtcggaaagcttcgttactgtagaggttagtatgtttgtggttgacatcttgtgtacctatcttccgttcaatgtagattctttttcttagtgctattttattttctgtcgtgcaggtgactggcgatcctggaaagatggctgctgtcctgagaaattttagcaagtatggaatcaaagaagttgccagaacaggaaaggtcagtcttttagacaattgcagtaaattcaccggaatactatgaatgatgcaaagattacgtgcggtaaatcgtaaacaggctgttgaatctcttcaactaaattatatctgatgcgaagtgcgtttattcaactaccttttttgtgtgaaatgatagattgctctaagacgagaaaggatgggcgagacagctcctttttggagattctctgctgcatcttatccagatctagaagaaaaggctgttgaatcttttgtcaggcctgcaaaaagaagcatcaatgctgatcctggctcatcgtctagtgtaagtgaagttttatttgatcaacatttatcttatccttctcttactttgtcttgcattagcgtatattctttttggtaattacaaatttagttttttttaaatgttcctagggtgatgttattattgacattgataaatattcttattggtagtatatagatatattatatttcccatagattgctctaagacaggtggcgtatatccgcccgtccgaaaccccgccaagtctcatacgggcatacggcccgtttggtaactggcaatgataatgaatgttagtataattttggtaagaatatcttctcataaacttaatgactttacttattctccttcaacaagctcattttccttacaaaattctttataatgcatcaccacttaaacctgtggtataaggtggtactgaaatattgtgaacaaaaacacttttttattattaaaatttcattaccatagtgatgacatgatacatattatgaagatttacactacaaatcattcccattaccaccatttagaaccattagcctaacgggcagttaatgcattgggataatggagtggaaaaaacgttaattgtcatttatgaactcaattttttgttttgggtttggcacttttgcatttggaatttaaaatgcgtttattcaatgaagggtgatgtttatccagtggagccttatgatgcctccataaatacagtacttgatgctcactggggagttctttacgaagatgatgtaagttctctttgtcactacctgaattttgttcatcttgtagcatactttcatatgatgtgatcttcagatcttttacttaatgttaccttaatttactaaatggcttcatatttttcccagaatggcctaaaattcgttagtttggctcataattatttaagacatgtcaaactttccttaagaccggctctatcaaatctttagccttatttgggaggttctggttaatgtctttcaatgtttggcttacttgttcatcctcagaactttcatatttgtttgattttaagcaacgttattagaattgagattctacaacactacgattctacctacgatctagattgctcgcttgtttcggatcgtattatagtagaattgtagatcagaatcatgattttaataactatggttttaagaatggagtagtttaataaatctgttctgttagtattctgatgtactttcaacatgccagtcaagcggacttgtgtcacatactctgtccatgctggtaaataatgctcctggagttctgaacaccgttacaggagtaattgctcgtagaggttataacattcaggtcagtacggactctgactgcaccatgaaagtatatctcgtcttttgcattatgttaagttgattgtcccttttccttcttcccagagtcttgctgtgggccctgctgaaaaggagggtctttctcgtatcacaactgttgttcctggaaacgacgagtcaattgcaaaattggttcagcaattaaacaaattagtagatcttcatgaggtgagcatctatttgcattcagcgtagacataatcgtccaaattagttagtgtcatgtttacttatgtcgttgttgtcgcagattcaagaccttactcaccagccatttgcagagcgagagcttatgttaattaaagtagcggcaaatacttcggccaggagagacgtccttgatattgctaatatattccgtgcaaaacctgtggatgtttctgatcacacaataacattacaagtaagcataaatgaatttggtagtttatttagtcttctcttgttactctcaacaatgtctattcacaaattcttgtgtgagacggtctcaccgtgatacgttccccatacatggattgaatagcccaactaatacaattatcagcatatgagcttcaattagtctcttacaagagtaaatcatgtctatatccttatttcgatggtccatttcgaattgaaacgaatataaataaaaagctaatggaatgcgagtatttcactaataacgaaaaccgtagggagctaagacagtttacggtattgaggatctctgtaatttgtctttgtttttttcagcttgccggtgatttagacaaaatggttgcgctacagagattattggagccttacggcatctgtgaggtatgtttatatgcatatttatttctcccgaaaccgattagaatcatttcatgtgttcgggtcaaataggaaatatatggccatttgtagcttttcaatagactccgagaaggcgagaacccttatctccttaactactaaaacatttacagctcgttgattgtcggtaataaaaggtgatattgagaataatttgtagtgtaaatttttcatgattgtattatatcattccctgggtaatgaatagttaatcataaaaaaactttttttttcgcaatttttcattaccatttgtgtcacctctacgaatggtaatgcatatgattgattgaatgagctttatgaaggaaataagatgattgaagtaaatcaatcaagatcgttaaacttgtaaagagattttctcaccaaacttactctaaatttcatttccatttccactattcaataccgataactaaacgggcatcagcaccatttagtcgagtacttgattgcaattcaatttaattcagttcagtttagttgtaagtagttctagagatagcgaacttcaatgatcatggactgactataacattttatatctgtcttcaaggtggcacggactggaagagtagcactagctcgagagtctagggtagattccaagtatttacgaggatacactcttccgttgtatgaatgaaaaactccggctatgtctttccgacattaccttgtccgattccttccgctcttctacactgcactacgggcagaacaattgcccacgagtagagtaaactaaaaggagaagcaacaataccgatctttgctttgaagattgtataacaatagagtttgtatttgactagtatttacattctttttattaaattgtatgatttgctcaacgttgtaattacatatcaccttgaggtttttgatttagcattgtaccctggctaagataacatagtcatttcaggacatacgagtgttcccagaacacaaggaaaaaaaaaagaacacaagaatattgaaaatttgaaacaaataactaatttaaaaaaaaaaaagcttctggtaaacttaatttcaaaataaagaatttccatgtccaagcctaaggtcatgtatgttcaaattcaactttcaagtaagaccttatcaaaaattatcaatacaagtttatcaatattttatattattagtgttattaggtcaattggctccatttttacgggcttggttaaaggactcaatagttcagtcaacaccttaggaaagcccaccttagggctgaaattacaaaaatgccttttgaatagtcatacaggtcattaattgctttataagtacccccattaattgtcgtttatggtatgctttctctctctatattactcacttgcattcaattcctatttcattgtaacgatcactgacttgagcgtcggaggggctttcggagagaccacccccggacaagtaactctgttcgttttgctggtcatcagtcgaactcgattttagtattcggaccctccaacagcaggatccacattcacaaacaaccccttccaatgaggaataatttgactcgatttctacgcaaaaacaattagcatggaaaatatttatatatactaaaatattatacattgtaaaataaatcatttaaattatacaacaatgtgggtacaaattaaaatgtaatttcatttcaagcaattggtaggttgaatgaagcctaaaacattcccatgagcattttgacaatatgattgagcttttccatcaatgtatttgagatcaatattttggagttgaattcctttgcatggatttgtggaactacaattaaatgtcattgctacctcgctttgtgaacttcctcttatattttggtacttcacatcctcgatttctatacccgattcctaataaacaaaattaattatatcatttatatctctgattgtgcataattaaaaattacaaaaaaattaatattagggatctttgcattgaaacgaatcaaacaagctaagatcccacttgattacatattgtcaaggaaccaactcaaccaaaagcttaagctgattgttgaggccttaggatatagtatatactctaacacgccccctcacacgagagccctttgggcttgaagtgtggacgcgacatagaacctcctaattcctggcgttgaatattccactttaaatgaggggtgattgagattcgaacctgtgacatcttgtttcactggctttgataccatgtcaagagaccaactcaactaaaagcttaagctgatggttgaggcctcaggatatgttatatactctaacacatattgtttatagattaagaatagtgtttggcaaattagcttattgagccattttagcttattttgattcaaatagagggttgagtggcaaaccagctaatgctagtgtttggtgaattagcttgttgagtcagcttattgatatgaataagctgtttttgaacaatctgctcatagcaacgggttcaaaaacagctggtcaaaccagttaatataatcagttagttaaatcatccactataatcaactattagttatcagtcgtttgccaaacattctcaaaatataaattacgagtaatcgataacagtgccgtttctggcaatgtacgggcc

SEQ ID NO: 1703 - DNA, 7941 bp, Amaranthus palmeri
caaacaaaaggtataaatttaattaatatacttaattcaaaaaaaaaaaattaattaatatactagtaagtgtgtttcgcatttcaatatttgaataatattatctttttggaatgataatatttaaaagcaacaaacaaaagttataaatttaattaaaaattacaactaagtgtgttttgcatttcaatatttgaataaaaaattataagtgagttgtctatttataataaaataaataatgcactactcatataatcatattcatcctcactactcatattcttcttcaaaaaaaatcctcactaccatctccattctccccatttcatttctttctcatatctctctaatggcggccatttcctttaacatcaatggcggaaagatcggaactttatgtccaaatcctaaatatggttgtgggtttttgagaaaatgggattttggagctcatacaactgtatctactaaacccatgtcaagaattttaagcttgaaagcagttgaagtttctgttgatgctacagtaaatgcagtttctgtttcagctaattctaggtaatgtacttaattaatattaccattttttcattgaatctaaactttttttcttcatgtggaattgtggatataggagtatttatggaaagaaatataagggtttttgcttctttattggtttttgttaaaaaaattgtatggttgcatacttttgtgatcattcatgttcaacacgttcgattgtacaaactctaaaaaattgaatgcaaaagatacaaaattgttcgaaaatatcataatttttgaaatttcacagggtcttttaaagaatttttcaaattttgctccggtcctgattctcctaagctcaccctataaggacttaaggagtcaccaaaaagtaaagttgagtatactagtcatgtgactctaattttagcctaggtggaagaaatagggtcaaggtcaatggaatgttgtttgtttgtttgttctggtatcattacaatttacagatatgaagttgcaataaggttttggattatattgtaccatattaaattggcttattagactatgtgtacttttatttatatgaaattgagatgatgtttgctgccaaacgtcaatcgaaaacaactatatattatcattaacaagggtaaatgtgaggtattgatccccaaacccccacaaatggaagttatttgatggcattgaggtgatataacattgtatgaagttgcaaattatgaagctaaatcctgtattaagtgggagatagagcatcttttggttgtaatgttataactttagttggattttgtaagttttgttgcaagttattcatgaattaaggagatgtgtctttctatgtgaatcacatatgtaagaagtagtttatatgtttgttgatctttatactgtatgatggccgattcaaatgtggaagttgatatgatccttttaaggtctactgagaagttgttcttcaattcattatattatccttggttttcgaccataggaggtcacatgttcgaatctagcctcatatataacatatcttgaggcttcaaccatcaacttaaactttgattgagttgcttccctgtgactttctcgccttcgcttcacctttatgcttggtttcagccttgctaagttgctagtcgtggagagggttacttcaagaagggtgtcagcatatatcactgcagatttttttgaatacaaaatcgtttttaaagaaatcatacatggttatcttactgctccttgattcgatggagcaaagttttgttgttatttgatttccgattataatggatcattgtaaaacgactctttaaattctgcgcacttcttatttatgtaaagttgcaaatgatgtttgctatatatgtggttatcttattgtatcttgttatttattctcaggtaatgaaacagaattcaaactctaatgacatttcatatatttcattttgtgtatacagggtgatgcgtcacacaatttctgtctttgtcggggatgaaagtgggataatcaataggattgcaggtgttatttctagaagaggatacaatatcgagtctttggctgtttgtttaaacaaggataaggctctttttactatagaagtgtgtggaactgacaaggtgttgcgccaagtcgtggaacagcttaacaagcttgttagtgttttgaaggtagttaatttcctttgttcttccttttattggtaaatggtgatagtgatacccttgtaacataaatcttcgaataatgagactatgacatagtgcttggttcaccactttacggattgcgttcgataaaattactttacgaggtcttataatttataaatctgttttccaaaatagcttatacaaactaaacatatcctgaatttgttttttactaaaataaaaaaaaattcttttaatatggagcgttacgtatcaatcaatataatggatcatcttatatgcatatgtttgtacaatgtacattttttgttagattgtctatttgtcctgataacaaccttggatgattcttgtatttcttgtaggttgaagatctatcgagagagccacaagtggaacgtgaactgatgcttgtaaagcttaattctgatgcaaattcccacgcagaggtagttccaaaaattcaatgataatttatgaatggtatattttccactttttaagttctaatttcctcggctgttgtcagttagagtctagcaaggaaaaagatagagatgttttgctttagattttatcgatgatcgagaaagatgctatacttcatataaggccatgactgttacaacaacaacgccagagctttagtcccaaaagttcatggctgttagatagtttaaatttaactagaagtacatcgtgttgtgtgaagctcgtataagaaattgcattagtgtctttgtgagaaatctaataccgattaacgtaaatttttaatttttgatcttcagctaatgtggctagtggacatcttcagggcaaaaattgtggatatctcagaaagcttggtcactgttgaggttagtggtatatttgtttgacttctcgcgtatctcttctatgtttgctgaattaagtccgatttttttggatttgcttccatgataaatgcaagaaatttacctacaagaagttgaccattttcctccggtcgatgtaaaatctttttccttattggcattttctttggtgctgtgcaggtgaccggagatcctggaaagttggctgctgtcctaagaaattttagaaagtttggaatcaaagaaattgcaaggaccggaaaggttagtcttttagacatttgcagtaaattcagcatagaattcggaaagccgcaaagagcacatgtcaactattgtggctagccagccaagtgccaactattgtgcatttctggtgtgatcaatgtgaaacaagtttagctaactacttgttttgttttatacttaatatgatagattgctctaaggcgagaaaagatgggtcagacggctcctttttggagattctctgctgcttcttatccagatctacaagaaaaggctgttgatgctctggccaagcctacgaaacggagtatcaatggtgattctggctcatcttcaagtgtaagtgatattttatcttctcgacaattatctttttccttttcttaccttgcattgcctatgtatacttcgttcaccttgtattgcctatagacttaaacatgcttttatttttgaagggtgatgtttatccggtggaaccttatgatggttcgatggttaatcaagtgcttgatgctcactggggcgtactttatgacggtgatgtaagtgctctatcactacctgaattttttgtcactaggttgtccaacggtccatgtgatgtcatgttcaaatcgcttagcctagtgttttctaatatagctccaaattaattgtctggattcacgattcacccaaaatggcctaaattttttcgttttaatttacaattgtccaagtcatgtcaaacatgtattaaggtctacactctgctctatgttacttggactcgggtactgagtcggcaacgtgtccaagtgtcgtacgcgtctaaatattcaattttacgcttaaaatgaagtgtctaaatgtcataccaatgtccgggcatcaaggatcggacataggtacgtgaagcaaaatgaagagtctgagtaatagcgtttcagcctcatttgaactttggagggttaaagtttatgtttttgggttttcagatgttcatctttctgttattcatgtttaattttaagaatgaaaggtagttcgacttttcagttttttgagctgcacagtactataaattggttttagtttgctctgctagtatcatgaattgcttcgttcttcatgccagtcaagtggtctccggtcacatacgctgtccatgctggtaaataatgttcccggagttcttaacactgttacaggagtaatttctcgtaggggttataacattcaggtcagtgtggactctgactacagcaagaaagtatataaagccgtttgtgttatgtaatgacaatcgttcccttttcatcctcttcagagtcttgctgtaggccctgctgaaaaggagggtctttctcgtatcacaactgtcattcctggaaacgacgagtcgattggaaaattggttcagcaatttaacaagttaatagaccttcatgaggtgagcaactatttatgtacaaaaccgaatagttgtaataagtggtatagactacatagtaataactttatggttgtaagatgcaaagtacccttatcagttatcactataatatgttctaagaagctcaaaactgaagtggaagagaaaattgtgacattggttagctccgcgtttatgacaaacttcttgattgattcttgtttttttgaatgctcagttcaatctcctttgtaatatgttgatgctcgttaagttacctattttctttgtaatacgtaaaccgtgaagttgtgttatcttagtccaacgtcacatcgtgctgctcgagtcatttgatttaaaacgctatttatattgaatagtgtaacatataacacagaaaaatagtagtcgggttggttcaacacacacaataatttcccacattctcccttgaatgaaagatacgagaatctaacatcagaatggttgctgctgcagattcaggaccttactcaccagccattttcagagcgagagcttatgttgatcaaaatagctgcaaatactacagccaggagagatgtccttgatattgctaatattttccgtgcaaaagctgtggatgtttcggatcacacgataacattacaggtactaagctgtaggcacacagtttttgccatgttccttgttttttcctaatatttctgacttggtcttttccagctcgccaatatgttgggattcaggctttggcattatttattattttattttttttgcattttttccaacttccttatattgggattaaggcgttggcgttgttgcattgttgactgttgtgtcttttccagcttacgggtgatttacacaaaatggttgcgctacagagactattggagccttatggcatttgtgaggtatgcgcctatgtattattgatttttctatataatcagattttatttatttatttttggttcgaaatatgctgattgttagttattttgcttttgaatgtgaaaggattctcttgtctgtagattaagaacaatcctgccaaaaatacctattgggcttaccttaactaattacatctgtcttgaaggtggcacggacaggaagagtagcactgagtagagagtctggggtcgattctacatctttacgtggatacgctcttccattgtacgaataaaaaatctccggctatgtctttccgtcattatcatgtccaatttccttcagcacgtctgcactacatttacatagcgaccaattgcccgtcaaccagagtgaaggaaagcagtaattctgatctttgcttagaacatgctattttgtataataggaataattttgtattggttgtatttgctcaacaccctgtagtaacattattacctcgagttcgaatatatgaaacatagtttttctcttaaatgcgttgagaacattagtacggccccttggccggctgacacgaattaatcgagaaggaattaggactgtaaacaattccaaatactagtgttttctcgtactgggaaaacaaaagcttttactcgacttcttagctttcgtagtagcattttgcaataatttccgaaatcataacttcaacaaactcgccatcacaattcacaccgagcaatgtttgatgcatcgatcttataatcaaacgaggatatacaatggggcataggataaacacaggaaactataattttattacgaaaaattctactataagcctttataacgatcaattacacattaaacctactatagaggatgatctataagtttgtatatcacacagaatctaacagctcattcaccaatttctcattcccgagcgacaatgagctcagaaggaaaaccagcatccgaggaatctgtaggaaccagtatatcatcatcggctgtgaagtcgtagttttgaccgatggctctcaatagttgatacacttcgaacattgttggcctttccttgtcgtttaagttaacacagttacaagcaactttaaggaactgtgttagttcgttatcgacactcttgtcacggagagacttatcgatggcagaacggcgatcgtttttttctgatagtagatgtatccattctaccaaattacccttgaaggtttcgggggcattcgacacgtgagttggtttttcacccgtgactagttccaaaagaacagtgccgaaactatagacatctccctttggagttgctacaagttttctcgggtattcgggagctacatacccaagatcaccaaattctccgttaacgaaagtgctcatgtgggtgtcaatcgggttcatgagtcttgcaagaccgaagtcggagagcttgggattgaaatcctcgtccaacaaaatacatttcgagcttatgtttctgtggaggattctagggttgcaattatgatgcatccaagccaaccccttagctgcgccgatagaaattttaagcctcaaaggccaatccaagctcttagcctcaggatctgaagggtgaagcctatcgtagaggtttccgtttgccatatatttgtagaccaagaacctctctttctttgctgtgcagaagcccaacagcggtaccaagttttggtgcttcacacttccgagagtgttcatctcagacaaaaattctttctctgtccgctgtgaatcttgcaatcttttaaccgtaaggagcgttccatcaggcatcatcgccttgtacatcgttcccattcttccagaaccgatcatattgttgttgctgaagctattagtggctttcatgaggtcatccaaactcattttcgaaattgtcttctcgaacatagaaacctgaatatcaagaaaaacattctacattacacacgcgtataaagaatggaaaatcagtaacaaactactcctgtctcacactacaagtcgcatacataaatatagtattgtcggatttcagcaaagagttattgttatcggtcaaacaggagagctcaccaaaagactagcttattaggtgagagccatttgcctataaaccccacaccaattgcatacacaaccgatgtgggacaagttccataccctgcaatggaccataaatcgacccccataaggccaacgtccttgttgggtcacgggatgacacaacacagagcctacaaccaacaacaaaca

SEQ ID NO: 1704 - DNA, 5448 bp, Amaranthus palmeri
ggtcacattttaacgggtcatcaacggattaggttaataaagggtcgggccattaacgggccttggtgtaaagggttgggcagagccgggtcaaataattataggaattggttgcaacattttttttttccactttttgtttttatattttagatattatatacaaagttaggttgacccaatgggccataaagttgaataaaaaaaactattacatgaacctttaaaaacgggtcaaagtgggcctggtttaaacgagctttgacccgtcctgccccgttgaaatttgacatgaccctccccgcctcgccctatttaaatttagctccatcccggcccattgaacacatctattcctaaaataactaacattatgatggctcatcctattcgctaccatgcatgtaaatgtacacagtgtctatccgtttatccttttttatatccctgtataccatttgtgactaacggtattaattttttatcttccttgtaggttgaagatctatctagagagcctcaagtggaacgtgaacttatgcttttaaagcttcattctaatgcagatacccatgctgaggtagttccaccagttcaaataattatatcctgaacgctatataattcatgaatcttttattttcctcttagaatcatcagctacaagaagttagataaagatgagcaaatgttcaaaaatatgctataacatcatgtgctttgtaagctttaaacttagagataacaaaaatacttaagaatacatcatgggtatgtagctgaagatcaaatgggaagttacattgcttctttgtgtgtattgtaaacaatctggtatcgtataagtccaaattccattttttgattttcagataatgtggttagtggacatcttcagggcaaaaattgtcgatatgtcggaaagcttcgttactgtagaggttagtatgtttgtggttgacatcttgtgtacctatcttccgttcaatgtagattctttttcttagtgctattttattttctgtcgtgcaggtgactggcgatcctggaaagatggctgctgtcctgagaaattttagcaagtatggaatcaaagaagttgccagaacaggaaaggtcagtcttttagacaattgcagtaaattcaccggaatactatgaatgatgcaaagattacgtgcggtaaatcgtaaacaggctgttgaatctcttcaactaaattatatctaatgcgaagtgcgtttattcaactaccttttttgtgtgaaatgatagattgctctaagacgagaaaggatgggcgagacagctcctttttggagattctctgctgcatcttatccagatctagaagaaaaggctgttgaatcttttgtcaggcctgcaaaaagaagcatcaatgctgatcctggctcatcgtctagtgtaagtgaagttttatttgctcaacatttatcttatccttctcttactttgtcttgcattagcgtatattctttttggtaattacaaatttagttttttttaaatgttcctagggtgatgttattattgacattgataaatattcttattggtagtatatagatatattatatttcccatagattgctctaagacaggtggcgtatatccgcccgtccgaaaccccgccaagtctcatacgggcatacggcccgtttggtaactggcaatgataatgaatgttagtataattttggtaagaatatcttctcataaacttaatgactttacttattctccttcaacaagctcattttccttacaaaattctttataatgcatcaccacttaaacctgtggtataaggtggtactgaaatattgtgaacaaaaacacttttttattattaaaatttcattaccatagtgatgacatgatacatattatgaagatttacactacaaatcattcccattaccaccatttagaaccattagcctaacgggcagttaatgcattgggataatggagtggaaaaaacgttaattgtcatttatgaactcaattttttgttttgggtttggcacttttgcatttggaatttaaaatgcgtttattcaatgaagggtgatgtttatccagtggagccttatgatgcctccataaatacagtacttgatgctcactggggagttctttacgaagatgatgtaagttctctttgtcactacctgaattttgttcatcttgttgcacactttcatatgatgtgatcttcagatcttttacttaatttactaaatggcttcataattttcccagaatggcctaaaattcgttagtttcggttcataattatttaagtcatgtcaaactttccttaagaccggctctatcgaatctttagccttatttgggaggttctggttaatgtctttcaatatttggcttacttgttcatcctcagaactttcatatttgtttgattttaagcaacgttattagaattgagattctacaacactacgattctacctacgatctagattgctcgcttgtttcggatcgtattatagtagaattgtagatcagaatcatgattttaataactatggttttaagaatggagtagtttaataaatctgttctgttagtattctgatgtactttcaacatgccagtcaagcggacttgtgtcacatactctgtccatgctggtaaataatgctcctggagttctgaacaccgttacaggagtaattgctcgtagaggttataacattcaggtcagtacggactctgactgcaccatgaaagtatatctcgtcttttgcattatgttaagttgattgtcccttttccttcttcccagagtcttgctgtgggccctgctgaaaaggagggtctttctcgtatcacaactgttgttcctggaaacgacgagtcaattgcaaaattggttcagcaattaaacaaattagtagaccttcatgaggtgagcatctatttgcgttcaacgtagacataatcgtccaaattagttagtgtcatgtttacttatgtgttaatattattttgatttttgtttttttgactattaacatgcaaaacagtactttacctctctactaacgtgtgccgaggcccaaggtttctacctaggatcgatgagaggttaagatcgaaatcaatgcaaccggatcgtagaattgtatacattaatttgctcagcgtaactgatcatcaattatatttgttatttttagtgttttgaggcgtaagccgtaaatcaaaattatttgacttcatctattaagttgtgaaaaataacaattttaataagcattgaaactgcaaatcaagaaaaatatgaattttatagtcatattgttataataattttacatatgtttatatatattcgaattctagattttaagataaattttttacgattgagactactcacataggaactgatcgttgaattgtaggatcgtgaatcgtgttatgatctaaccccctaaattcttgagataagtgtgatgatacgatcctaccaactataagatcccacctacaatccggattgattgccaatttttggatcgtggattgggattgggattctgataaccatgtcgaggcctaaagagaacaaaagagatgaaaggagttaacaccaattctttagctttgtgcttgtatcaacaaaacaccatgcgagattcttgttattctaaaagccctattcagcccgtacctatcatttgttttatatcgaatcagtgaagctaagtcgagtaacatttttcgtgtaatctttaattgcgtagataattcagatatcttgcacgctcttcaattctctactatggagttctgattgtcttgtagtttgtatataagtactacaattatgattgaaagattagaacatcttattccggaaaggttgttgtcgcagattcaggaccttacgcaccagccatttgcagagcgagagcttatgttaattaaagtagcggcaaatacttcggccaggagagacgtccttgatattgctaatatattccgtgcaaaacctgtggatgtttctgatcacacaataacattacaagtaagcataaatgaatttggtagtttatttagtcttctcttgttactctcaacaatgtctattcacaaattcttgtgtgagacggtctcaccgtgatacgttccccatacatggattgaatagcccaactaatacaattatcagcatatgagcttcaattagtctcttacaagagtaaatcatgtctatatccttatttcgatggtccatttcgaattgaaacgaatataaataaaaagctaatggaatgcgagtatttcactaataacgaaaaccgtagggagctaagacagtttacggtattgaggatctctgtaatttgtctttgtttttttcagcttgccggtgatttagacaaaatggttgcgctacagagattattggagccttacggcatctgtgaggtatgtttatatgcatatttatttctcccgaaaccgattagaatcatttcatgtgttcgggtcaaataggaaatatatggccatttgtagcttttcaatagactccgagaaggcgagaacccttatctccttaactactaaaacatttacagctcgttgattgtcggtaataaaaggtgatattgagaataatttgtagtgtaaatttttcatgattgtattatatcattccctgggtaatgaatagttaatcataaaaaaactttttttttcgcaatttttcattaccatttgtgtcacctctacgaatggtaatgcatatgattgattgaatgagctttatgaaggaaataagatgattgaagtaaatcaatcaagatcgttaaacttgtaaagagattttctcaccaaacttactctaaatttcatttccatttccactattcaataccgataactaaacgggcatcagcaccatttagtcgagtacttgatttcaattcaatttaattcagttcagtttagttgtaagtagttctggagatagcgaacttcaatgatcatggactgactgtaacattttatatctgtcttcaaggtggcacggactggaagagtagcactagctcgagagtctagggtagattccaagtatttacgaggatacactcttccgttgtatgaatgaaaaactccggctatgtctttccgacattaccttgtccgattccttccgctcttctacactgcattacgggcagaacaattgcccacgagtagagtaaattaaaagggagaagcaacaataccgatctttgctttgaagattgtataacaatagagtttgtatttgattagtatttatttgctcaacgttgtaattacaattcatcttgaggttttgatttagcattgtacccgggctaagataacctagttgtttcaaaaaaaaaaaaaaaa

SEQ ID NO: 1705 - DNA, 5396 bp, Amaranthus palmeri
aatctggtatatttttcattgatttgtgtgtgttgttgcttcttgcatgttatttgttcttccgtttgatttttatacaagagagcgtgcaaattttagcatgttgtcagttcttaaattgatcactgtctgtattttgttagtctaccccattaaaacgactcactaaatcactttttttatttgggtgaagatgtttatgatctttgctacaaagatttaatcggaaataatttctagttattatcactaataagggtaagatcgtatacattagactccaaaccccggccgtaatagaattggggtaatgattaaggtaatgaaatgttgttgcctgtatttttgtaatgaattccaaacaggctgttaaatatagatactttccctgtaaaaatacaagagtttataaggctcttattcaacccaacataagtttattgaaagatttattagtagtctttttgtgattcgtaaccttgtaattaccaagtacagctctttatttctatgacattgaaaccgtctgcaatcaaattgacctagtgctaaaagctgcttgatttgcttattgccttaagtgaaaatttatagcaagcgttttggaggaagaaaagcaaaaagatcgatatgctttcatgtcttcagaaaattagttccgaaagttgtggagtataatagagttcaactattgtgcatgtaaaatattaatctcaagtaattctgatagaagaccatctgggaagatttaattagtgctaatctgggaggaattattaagattagtcagtaatctggcaacatttatctaggaggatagaaaaggcattgaccgtatgtagtaatattagtgcatgggaagttcacgtgcagttggaagacacttttccgttataaagggtcattatgaaatagtggacacgtgttagtaggagaagctaagagcgccatagaaaataaaggaaaaaccattaaagtaattaagggcttgaaacaaccaaaacaagcacagtggcctgtggagaattttggggattaatttctttctcttccaacattataatgtcaatttatgtcatttgtgctaaagtgacacttaatgtaccctatcttccttcgacttaatttaaactatcgtgacttcaactcttatctttattgttataacctagcttctacccattacgcgagttcattttcatctacctttatatagcttatcattaatatgttctcataataattcaaaagtttgcatctatctaattttagagctacaagtgttgcttgtagtaattgtgtgtcgttagattgtagtgcgtgaactatccatttttcgtgaactgttgcatttcttgaatgacttgtctctagaatgatgctccttaaacttacttcttttgtatcatgtatgtttaagggagagacgacatacaatatcagtatttgtgggggatgaaagtggaatgattaatcgaatagcaggggtttttgccagaagaggttataatatcgaatcactcgctgttggattgaacaaggacaaagctctcttcactattgtagtttctggaacggataatgtgttgcagcaagtgatggaacagcttcaaaagcttgtcaatgttttgaaggttattttccttttgaataattaccgtggcatccatgtcttcaattgtttagaattctcatcactaagcacaacttgtacatttaggttgaagatatatccaaggagcctcaagtagaacgtgaattgatgcttgtaaaagttggagctgatcggaataaccgtgctgaggtacctaataatatatgtcaaaatacccaactgtacaaaagagttgatcttattagatacaggcagatatgttagctacagcctacatctctatgttttttgtggcaactttctgctacatgccgatctttcttagttttctcctagtgaattgtaatttttaatatataatttgttattccactatgtctgttcctgatttactttcgctgatcacatcgttcgtgtttcttctattgtagctgatgtggttggtggacatctttcgtgccaaaattgtggacatatcggaagagtatctttcaatagaggtaatcacaggatatttcataaaatcaatgttaattttgggaatattgggaatattgtgacaagtatcaatgttttatgtacaggttaagtgtttaatttgcattttccacaagctacttcatcctcttctccgaagatgtgtaaaattgtaatatacatattcacaccaattttaaaattttggaagagcgacatacaaatgatttatgacctaattttgctgtatatatacatgcttatattttcttcaaacagctttagaaaattgattatatttttcctccttcaaagaaaacaagttttgtgagataaaagctacatgtttagtaagcaaatttaatgaagactgatgaaaacaaaatttgtacttttgaatggttttatatattttatgatctttgtaagctaatatggaaactataagattgtagttggttttctttagctcttttcgcttttacctttcatttttttttacatgcttaaaaaagcgactcacctagtactttgatatccaggtcactggagatccaggaaagatggttgctgtccttagaaacctaagcaagtttggcatcaaagaaattgctcgtaccggaaaggtttactaattttttttgtaaatttttcattgttgtttaagagatcttttagtttccacattgcataataaatgtgaatgccttttgtttattgcttgtccagggtttttatatttttttaagatgtaaagtttaatatctaacagattgctctaagaagggaaaaattgggcgagtctgctcctttctggcgtttttctgctgcttcttatcctgatcttgaagaagctatccctatggattctctttctggagttgcaaaagcagcaactgctgctggatcatcggattcgtctgtggaggtgtgtttcttatttgtccaaaattaagtgtccaagtgtcgtgcccaagtccgaatatcgaggatcagacatgggtacttgagttaaaatgaagagtccgggtaacaaatgtaattgatttaaaaacatatagttgccggattttaaaatttttttaaaggtagttggaaaattttccttttattggaaaaacttttggaggacaatatttttgtgaatgtgtctcgagtgcctcttatgttaaagggcctcaagacgaataggaaatggcgggcgggtcgaatgcgggtgtgcaggctggttgctggcaatgtttccgcaggctgttgttggtgtgcttttcacttcagtagcaatttacagcaaattagtagcaaatttacagcaaatttacagcagaatgttagctcaataacccatcatgacataaatattaatgtataacataactttaactacaaaatacaatttagaatcatcaaatcacaatttagttgtttaatatacattaaaatatttctttgtaggaacttcaattctatctcttagtagcataaattttacaatcaaacgcaacaaaagtattaagttagaaagggagtactgcatgtggattgtctcagctaaagtgctgcagcagctttgcacattatctagtgagacattggaaatgattaggagctttgggataaatatgtacagaaacacttctcttcttgccatcccaaggatactgcagcttcaggaaaatgaaggtcctgtatgatttttagaaactccaccaaattctgaagattaagctcacctccgtacctaacattgagatatcttcagtatattcgcacctacctgataccttgctatgagatctctgttaatcagcttcactaagacaagccaaaatttctaactagaagtcattttctgcaaattttaatgcagattccagaactacccattatcattaaacttgaatatttcccctttttataacatttctgatgcctcttgtatgctaatcttttctaactatatacactaccacaaaacacaaatctatacttactctaaataagtttagtatgaattacattttatttttagtgactacgacttagaagtatatcttagacaacttacattgtagattaatatgacataatttgtttcttcaaaataaaaaatgacataatatgttatcaatctagacctcctcaagacaagtatgataaaaaaaaactccaatgcaacaaaaattaattgatttttttgaaaaaagatagaagaaagtggaagaggcaacacaagtaaagaaggcttctcgatcctctgagcactctaaaccttgcaatacagtaaactataaataaaaacaacaaagttcagatatcatctcaatattttccccaaaaaaggttcaacatcatcttcttcctcttcttccacaatctcattgtcatgttcatctaaaagcctatccttgtcctcaatggtgttgtgcatagcacgccttggaggcacaccaacacttgcactgcctttgacttcaagaactttgagtagcaacaatcgtcttatcaccttggccaaagggagatttggaagtcataatactcactggaatgtatataaaatgactataatattaaaagacaatgaaaatgatttttgtgcatttaaaaagatgttttcaagtgactatttttgggtttatcttttctatttcttctctctctttacttggacccttttcttcctattgcaacttggatctttcagattggacactctctttgtggctatatgatgttttctaagctctataagtatctttgctctacaactttcttgccttattcttctattaccatctcccacatactcccaatattattacttaaagaattttggctgcttgtacaagtatgtttggtccttgaactacattctgtctccccccttccattgtattttctattacgggttttctgaaaatgtcctccctgcccttatttgtcatttatggctacatgacttgatcattgcactatatgatggaaatttaagcagtattgttgtagttgtacttttttgatgaatcatcatgtctgcttctgaattggactcacttcaatatcttgaaggtttttttcctctattttttagggtgatgtttatcctgtggagccgtttgatggtttctcccctccaatcttagatgctcattggggtattttgaatgaagaagatgtaagcgactttcctttctcttttatttatctcgggttgttattttttagttccattgtttgcctttcgtgttcattttcgatataaatagttttatcatgcttcagtttcaaattttaatggata

SEQ ID NO: 1706 - DNA, 5223 bp, Amaranthus palmeri
ataatattatctttttggaataatataattaaaagcaacaaacaaaatgtataaatttaactaatatacttaattcaaaaaaaaaaataaattcaattaatataccagtaagcagtaagtgtgtttcgcatttcagtatttgaataatattatctttttggaatgattataattaaaagcaacaaaagttataattttaattaatatatatacaagtaagtgtgttttgcatttcaatatttcaataaaaaattataagtgagttgtctatttataataaaataaataatgcactactcatattcttcttcaaaaaaatcctcactaccatctccattgtccccatttcatttctttctcatatctctccaatggcggccatttcctttaacattaatggcggaaagattggaactttatgtccaaaacctaaatatggttgtgggtttttgagaaaatgggattttggagctcattcaactgtatctacaaaacccatgtcaaaaattttaagcttgaaagcagttgaagtttctgctgatgctacagtaaatgcagtttctgtttcagctaattctaggtaatgtacttaattaatattaccatttttcattgaatctaaactttttttcttcatgtggaattgtggatataggagtatgtatggaaagaaatataagggtttttgcttctttattggtgtttgtttaaaaaattgtatggttgcatacttttgtgattattcatttattctgagcatgtttaacatgttcgattgtacaacctctaaaaaattgaatgcaaaagatacaaaattgttagaaaatatcataatttttaaaatttcatggggtcttaaaataattgaaattttcaatttttgctccggccctgatcctcctaaagctcactctataaggagtcaccaaaaagtaaagttgagtataatagtcatgtgactctaattttagcctaggtggaagaaatagggtcaaggtcaatggaatgttgtttgtttgtttgtttgttctggtatcattacaatttacagatatgaagttaataaggttttggattatattgtaccatattaaattggcttattagactatgtgtacttttatttatgtgaaattgagatgatgtttgctgccaaacgccaatcgaaaacagatatatactatcattaacaagggtaaatgtgaggttatttgatggcattgaggtgatataacattgtatgaagttgcaaattatgaagcttaatcttgtattaagtgggagatagagcatcttttggttgtgatgttataactttagttggattttgtaagtgttgttgcaagttattcatgaattaaggagatgtgcctttctatgtgaatcacatatgtaagaagtagtttatgtgtttgttgatctttatactgtatgatggccgattcaaatgtggaagttgatatgatccttttaaggtctactgagaagttgttcttcaattcattatattatccttggttttcgaccataggaggtcacatgttcgaatctagcctcatatataacatatcttgaggcttcaaccatcaacttaaactttgattgagttgcttccctgtgactttctcgccttcgcttcacctttatgcttggtttcagccttgctaagttgctagtcgtggagagggttacttcaagaagggtgtcagcatatatcactgcagatttttttgaatacaaaatcgtttttaaagaaatcatacatggttatcttactgctccttgattcgatggagcaaagttttgttgttatttgatttccgattataatggatcattgtaaaacgactctttaaattctgcgcacttcttatttatgtaaagttgcaaatgatgtttgctatatatgtggttatcttattgtatcttgttatttattctcaggtaatgaaacagaattcaaactctaatgacatttcatatatttcattttgtgtatacagggtgatgcgtcacacaatttctgtctttgtcggggatgaaagtgggataatcaataggattgcaggtgttatttctagaagaggatacaatatcgagtctttggctgtttgtttaaacaaggataaggctctttttactatagaagtgtgtggaactgacaaggtgttgcgccaagtcgtggaacagcttaacaagcttgttagtgttttgaaggtagttaatttcctttgttcttccttttattggtaaatggtgatagtgatacccttgtaacataaatcttcgaataatgagactatgacatagtgcttggttcaccactttacggattgcgttcgataaaattactttatgaggtctaatgaacccgttttccaaactagcttatacaaactaaacatatcctgaatttgttttttactaaaataaaaaaaaattcttttaatatggagcgttacgtatcaatcaatataatggatcatcttatatgcatatgtttgtacaatgtacattttttgttagattgtctatttgtcctgataacaaccttggatgattcttgtatttcttgtaggttgaagatctatcgagagagccacaagtggaacgtgaactgatgcttgtaaagcttaattctgatgcaaattcccacgcagaggtagttccaaaaattcaatgataatttatgaatggtatattttccactttttaagttctaatttcctcggctgttgtcagttagagtctagcaaggaaaaagatagagatgttttgctttagattttatcgatgatcgagaaagatgctatacttcatataaggccatgactgttacaacaacaacgccagagctttagtcccaaaagttcatggctgttagatagtttaaatttaactagaagtacatcgtgttgtgtgaagctcgtataagaaattgcattagtgtctttgtgagaaatctaataccgattaacgtaaatttttaatttttgatcttcagctaatgtggctagtggacatcttcagggcaaaaattgtggatatctcagaaagcttggtcactgttgaggttagtggtatatttgtttgacttctcgcgtatctcttctatgtttgctgaattaagtccgatttttttggatttgcttccatgataaatgcaagaaatttacctacaagaagttgaccattttcctccggtcgatgtaaaatctttttccttattggcattttctttggtgctgtgcaggtgaccggagatcctggaaagttggctgctgtcctaagaaattttagaaagtttggaatcaaagaaattgcaaggaccggaaaggttagtcttttagacatttgcagtaaattcagcatagaattcggaaagccgcaaagagcacatgtcaactattgtggctagccagccaactattatgcatttctggtgagatcaatgtgaaacaagtttagctaactacttgttttgttttatacttaatatgatagattgctctaaggcgagaaaagatgggtcagacggctcctttttggagattctctgctgcttcttatccagatctacaagaaaaggctgttgatgctctggccaagcctacgaaacggagtatcaatggtgattctggctcatcttcaagtgtaagtgatattttatcttctcgacaattatctttttccttttcttaccttgcattgcctatgtatacttcgttcaccttgtattgcctatagacttaaacatgcttttatttttgaagggtgatgtttatccggtggaaccttatgatggttcgatggttaatcaagtgcttgatgctcactggggcgtactttatgatggtgatgtaagtgctctatcactacctgaattttttgtcactaggttgtccaacggtccatgtgatgtcatgttcaaatcgcttagcccagtgttttctaatatagctccaaattaattgtctggattcacgattcacccaaaatggcctaaattttttcgttttaatttacaattgtccaagtcatgtcaaacatgtattaaggtctaaactctgctctgttacttggactcgggtactgagtcggcaacgtgtccaagtgtcgtatgcgtctaaatattcaattttacgcttaaaatgaagtatctaagtgtcataccaatgtccgggcatcaaggaacggacataggtacgtgaagcaaaatgaagagtccgagtaatagcgtttcagcctcctttgaattttggagggttaaagtttatgtttttgggttttcagatgttcgtctttctgttattcatgtttaattttaagaatgaaaggtagttcgacttttcagttttttgagctgcacagtactataaattggttttagtttgctctgctagtatcatgaattgcttcgttcttcatgccagtcaagtggtctccggtcacatacgctgtccatgctggtaaataatgttcccggagttcttaacactgttacaggagtaatttctcgtaggggttataacattcaggtcagtgtggactctgactacagcaagaaagtatataaagccgtttctgttgtgtaatgacaatcgtccccttttcatcctcttcagagtcttgctgtaggccctgctgaaaaggagggtctttctcgtatcacaactgtcattcctggaaacgacgagtcgattggaaaattggttcagcaatttaacaagttagtagaccttcatgaggtgagcaactatttatgtacaaaaccgaatagttgtaataagtggtatagactacatagtaataactttatggttgtaagatgcaaagtacccttatcagttatcactataatatgttctaagaagctcaaaactgaagtggaagagaaaattgtgacattggttagctccgcgtttatgacaaactacttgattaattcttgtttttttgaatgctcagttcaatctcctttgtaatatgttgatgctcgttaagttacctattttctttgtaatacgtaaaccgtgaagttgtgttatcttagtccaacgtcacatcgtgctgctcgagtcatttgatttaaaacgctatttatattgaatagtgtaacatataacacagaaaaatagtagtcgggttggttcaacacacacaataatttcccacattctcccttgaatgaaagatacgagaatctaacatcagaatggttgc

SEQ ID NO: 1707 - DNA, 4591 bp, Amaranthus palmeri
aaattagttggttaaaaaaactttttgctaaaacaaaatgtacttttctaatactcctatctaaaaccccaactaatactagtgtgtcttcctttgcaccccggttgtcctcgtcaggccgagttagctgtgtttcaaatttccatccatggaggctgtgtcgactcacctttcaacgagttttaactccattccgaaaagcaatagactgaaccaccaaactgcaaaacgattagggttctccttgaaaccccattcgctaggttttaagtttaactccaatagtgacaggaattcggagtttgataaactggttgtatctgcaagcaatgttgatcaactgggaaatcaaagtaacttatcctttaatcccccttcttcctctcgatcaaagtacgttatttttcccttttttgattaattttcacaatgtataatttaggtttggcttgttgttttatcttctactagttaattttgcttttcattaattattgaattttgaaatgaaaatgagtgattatttgatttatgagcaattgttgtcactcgtgccagcctgaaggattgggaaaattagtcaattatgaatctggtatatttttcattgatttatgtgttctgttgcttcttgcatgtaatttgttcttccgtttgatttttatacaagacagcgtgcaaattttagcatgttttcagttctgaaattgatcacagcctgtatttttttagtctaaattataacgactcattaaatcattttttttatttggtgaagatgtttatgatctttgctacaaagatttaatcggaactaatttctagttattatcactaataagggtaagatcgtatacattagactccaaaccccggccgtaatagaattggggtaatgattaaggtaatgaaatgttgttgcctgtatttttgtaatgaattccaaacaggctgttaaatatagatactttccctgtaaaaatacaagagtttataaggctcttattcaacccaacataagtttattgaaagatttattagtagtctttttgtgattcgtaaccttgtaattaccaagtacagctctttatttctatgacattgaaaccgtctgcaatcaaattgacctagtgctaaaagctgcttgatttgcttattgccttaagtgaaaatttatagcaagtgttttggaggaagaaaagaaaaagatcgatatgctttcatgtcttcagaaaactagttccgaaagttgtggagtacaatagagttcaactattgcgcatgtaaaatattaatctcaagtaattctgatagaagaccatctgggaagatttaattagtgctaatctgggaggaattattaagattagtcagtaatctggcaacatttatctaggaggatagaaaaggcattgaccgtatgtagtaatattagtgcatgggaagttcacgtgcagttggaagacacttttccgttataaagggtcattatgaaatagtggacacgtgttagtaggagaagctaagagcgccatagaaaataaaggaaaaaccattaaagtaattaagggctgaaacgtccaaaacaagcacagtggcctgtggagaattttggggattaatttctttctcttccaacattataatgtcaatctatgtcatttgtgctaaagtgacacttaatgtaccctatcttccttcgacttaatttaaactatcgtgacttcaactcttatctttattgttataacctagcttctacccattacgcgagttcactttcatctacctttatatagcttatcattaatatgttctcataataattcaaaagtttgcatctatctaattttagagctacaagtgttgtttgtagtaattgtgtgtcgttagattgtagtgcgtgaactatctatttttcgtgaactgttgcatttcttgaatgacttgtctctagaatgatgctccttaaacttacttcttttgtatcatgtatgtttaagggagagacgacatacaatatcagtatttgtgggggatgaaagtggaatgattaatcgaatagcaggggtttttgccagaagaggttataatatcgaatcactcgctgttggattgaacaaggacaaagctctcttcactattgtagtttccggaacggataatgtgttgcagcaagtgatggaacagcttcaaaagcttgtcaatgttttgaaggttatttttcttttgaataattaccgtggcatccatgtcttcaattgtttagaattctcatcactaagcacaacttgtacatttaggttgaagatatatccaaggagcctcaagtagaacgtgaattgatgcttgtaaaagttggagctgatcggaataaccgtgctgaggtacctaataatatatgtcaaaatacccaactgtacaaaagagttgatcttattagatacaggcagatatattacctacagcctacatctctatgttttttgtggcaactttctgctacatgccgatctttcttagttttctcctagtgaattgtaatttttaatatataatttgttattccactatgtctgttcctgatttactttcgctgatcacatcgttcgtgtttcttctattgtagctgatgtggttggtggacatctttcgtgccaaaattgtggacatatcggaagagtatctttcaatagaggtaatcacaggatatttcataaaatcaatgttcattttgggaatattgggaatattgtgacaagtatcaatgttttatgtacaggttaagtgttttatttgcattttccacaagctacttcatcctcttctccgaagatgtgtaaaattgtaatatacatattcacaccaaatttaaaattttggaagagcgacatacaaatgatttatgacctaattttgctgtatatatacatgcttatattttcttcaaaccgctttagaaaatttattatatttttcctccttcaaagaaaacaagttttgtgagataaaagctacatgtttagtaaacaaatttagtgaagactgatgaaaacaaaatttgtacttttgaatggttttatatattttatgatctttgtaagctaatatggaaactataagattgtagttggttttctttagctcttttcgcttttacctttcattttttttacatgcttaaaaaagcgactcacctagtactttgatatccaggtcactggagatccaggaaagatggttgctgtccttagaaacctaagcaagtttggcatcaaagaaattgctcgtaccggaaaggtttactatttttttttgtaaatttttcatcgttgttaaagagatcttttagtttccacattgcataataaatgtgaatgccttttgtttattgcttgtccaggttttttatatttttttaagatgtaaagtttaatatctaacagattgctctaagaagggaaaaattgggcgagtctgctcctttctggcgtttttctgctgcttcttatcctgatcttgaagaagctatccctatggattctctttctggagttgcaaaagcagcaactgctgctggatcatcggattcgtctgtggaggtgtgtttcttatttgtccaaaattaagtgtccaagtgtcgtgcccaagtccgaatatcgaggatcagacatgggtacttgagttaaaatgaagagtccgggtaacaaatgtaattgattaaaaaacatatagttgccggattttaaatttttttttaaggtagttggaaaaatttccttttattagaaaaactttgggaggacaatatttttgtgaatgtgtccgagtgcctcttatgttaaagggcctcaagacgaataggaaatggcaggcgggtcgaatgcgggtgtgcaggatggttgctggcaatgtttccgcaggctgttgttggtgtgcttttcacttcagtagcaatttacagcaaattagtagcaaatttacatcaaatttacagcagattgttagctcaataacccatcatgacataaatattaatgtataacataactttaactacaaaatacaatttagaatcatcaaatcacaatttagttgtttaatatacattaaaatatttctttgtaggaacttcaattctatctcttagtagcataaattttacaatcaaacgcaacaaaagtattaagttagaaagggagtactgcatgtggattgtctcagcaagtgctgcagcagctttgcactatctagtgagacattggaaatgattaggagctttgggataaatatgcgcagaaacacttctcttcttgccatcccaaggatactgcagcttcaggaaaatgaaggtcctgtatgatttttagaaactccaccaaattctgaagattaaactcacctccgtacctaacattgagatatcttcagtatattctcacctacctgataccttgctatgagatctctgtaaatcagcttcactaagacaagccaaaatttctaactagaagtcattttctgcaaattttaatgcagattccagaactacccattatcattaaacttgaatatttcccctttttataac

SEQ ID NO: 1708 - DNA, 4516 bp, Amaranthus palmeri
aagaaaagtgtagacacaattaaaaagttcactttgaataggaaccaaggaaatctaggtaaattataattatttaggagaatggtaaatcatcacaatgtggcctaattttataaaaggatatttggtattttttttaatatttttcttgtattaattattttattaaaatgactgatgatttctaaatcaccattattgattaagatttatataaatcacattgtaaaagcaaaacaaaaagcacaaattcaataatatactctttaagtttgtttatcttctaattagttcggttaaaacggttccccactttcttctccgactctcacaattatcttcccctattcatttttcttccaccctctctaatggcggctgtttccttcaatatcaatggtggaaagattggaactttatgttcaagacacgaattcgtttgtgggtttgtaagaaaatttcattttagaactcatacttctatatttgaaaaacatatgccaaaaacttcaaggtttaaagcaatggaagtttctgcaaatgcaacagtaaatatagttcctgtttcagctcattctaggtaattttatttctcgaaaatttccgatttacaattaaattaatcttgttttgtaggtaatgaattgcagaagaaatagatggattcttatttgtttattggtatttgtttataaatttttgtttatattagtttctgaattgtgattattctgattgtatgtcaaggtttaggttgttactaaatgtaaattggattgattgaagttgcaataaggtgatggcgtgatgctgattgttgtaaatttttgtttatattagtatagtactacttattgacctaagttcttttacatagtaggagatattataacttttgcttgtggactcagggccggccctaagggtgggcaagaggggccgtctcccaatgcccatgtcaaaaaagcaaaattaatggttatataaggtttatataggttataaattgtaaaggaaaaggacgtcaatgtgtcatttctcccagggccccaaaatatctaggaccggtcctgaaagaaactactcaaaatttgtaggattttctattgagacatttttttttttgtggattaatgattgaactaagatcaaatagatactatttctgtttgattgaaacttttgggtagccggatgtgtaccggcgtgtgacttctttttgagttggttgattcaattgtattgttagaaatgatcttttctagggtctttggagacattggttctttacttttagtctatgaattatgatagtgttggtttaaacaccattttgttaccctattgtgattaagtgactcccagctcgattaaatttaggagttatattaatgttgtctttgttagttatattgatggtcggtagttcggttaagtttgtctatgaatacattgattttatccttatttggccaacaaatgtatgtaatttaggaaagttatatgatttaccactttgtatttgtatctctgttattttctttcttcttttcttgatgtgttggttggataaaaggaatttggagggaaagaaaggaaagagaaatagagggatgagactttgtcatatgtatatcaaatagagatgggaaatggaggggagggaataataacaatgaattccttctgttgtttttgaaaccaatttctccattattagaaggaactcatatccttgtgtatgatcggagaaagtaatgactgaatcattcatgaagctcatccttggtgaatttatctcttgctaatttctcccattttagaatgaccccggtcactacatttatgctaagtctgattgctcgggccgttgcctactaatcattccaaatctcttgaataaaagtcattttaaattatcaaatgtatctcattctatgctgttttttttcttgtatgttgttatcattagcatggtaacaaaatgtattttcattcttttccagggtgatgcgccacacaatttcagtctttgttggggatgaaagtggtataatcaataggattgccggcgttatttctaggagaggatacaacatagagtctctagctgttggtttaaataaggataaggctctttttactatagtagtgtgtgggactgacaaggtgttgcgccaagtaatggagcagctcagcaagcttgttaatgtcttaaaggtagtcatctccttttttcttactttaaggtaactagtgatactttcatttagtagtggcggtcaatggtgatgctaaccatgcatgttcatattgtttgtgcaatattgctcattttggctttatcattgttgttaaactttgagagaatgtaatctcaagagcatctatcctcacttcaagatagatagagcagggaaacactcatgattcttttaataaactttcaaaatattaaaattcccttgccctaatgcaattttatagctcccagctaatccgagttcaaggggttcgagtgtatgcaaccatactcatataacaacaaaatggttgattcagattgacccttaaaatcaaataccatcttgcaaattcacttaaacacatactttaacgacccgttttatagtagtccattaaaattcgaaagcaaagaattataaaatcttttattccatcgagaatagacacaataatcttcaaagcaatgtctataaaaagtttgtcgtgtcaccgtatcgtaacttaattgtaagggccttcaattttactgccatcaaaatataggttgagacccacaaaaccatttacatagacaagagccatttcactaccattatcatgaccatgattgagaccgcatttgtgcacaatggtcaagtgacattgttcagcactactcagaacttgaattggaggaatttgtctaatgatctacttatgtaacaaattcttgataatgttgtcacatatagtggggagaagtttgaaggtcacatagctaccacatgtaactgaatgcatctattgcagttaaacctaatggcagggagctgtcaatgcagtcttttgaaaggaacttgtagaaggtatcttttaaagaaaaaaaatttgtcgttagtttttaaaaaaagttaaaaattattttcttgaaaattttctttttaagtaaaataagtgtggtaaaatggacattatgttggaacttagaatttttagtaatagcttgttaattagcatgggaagtgattaatgaagttttatgtccattaggtaataatgtgtgaagtattcttatatgtattattgcttgcactttccatttgatggtgcgcatcagggtgtgcaatagtactttatctgatctgacatatatgttcttacttatgctatatgctcgcatttaagcattccttactaaaggtgtttaacgggacgattcgactaatggatcaacggtcgggtcgggtcatatctttaacgggtcatcagcgggtcaggttaataaagggtcgaaccattaacgggccttgatgtaaagggtcgggcagagccgggtcaaataattataggaattggttgcaaaaaattttttttccactgtttgtttttatattttagatgatattatatacatagttaggtcgatccaacgggccataaagtagaataaaaaaaactattacatgaacctttaaaaacgggtcgaagtgggcctggtttaaacgggctttgacccgtcctgccccgttgaaatttgacatgaccctccccgcctcgccctatttaaatttagctccatcccggcccattgaacacatctattcctaaaataactaacattatgatggctcatcctattcgctaccatgcatgtaaatgtacacagtgtctatccgtttatccttttttatatccctgtataccatttgtgactaacggtattaattttttatcttccttgtaggttgaagatctatctagagagcctcaagtggaacgtgaacttatgctattaaagcttcattctaatgcggatacccatgctgaggtagttccacaagttcaaataattatatcctgaatgctatataattcatgaatcttttgttttcctcttagaatcatcagctacaagaaggtagataaagataagcaaatattcaaaaatatgctataacatcatgtgctttgtaagctttaaacttagagataacaaaaatacttaaggatacatcatgggtatgtagctgaagatcatatgagaagttacattgcttctttgtgtgtatcgtaaacaatctggtattgtataagtccaaattccatattttgattttcagataatgtggttagtggacatcttcagggcaaaaattgtcgatatgtcggaaagcttcgtcactgtagaggttagtatgtttgtgattgacatcttgtgtacctatcttctgttcaatgtagattctttttcgtagtggtatttttttttctgtcgtgcaggtgactggcg

SEQ ID NO: 1709 - DNA, 1767 bp, Amaranthus rudis
gtgtctttctttgcaccctggttgtcctcgtcaggccgagttagctgtgtttcaaatttccatccatggaggctgtgtcgactcacctttcaacgagttttaactccattccgaaaagtaatagattgaaccatcaaactgcaaaacgattagggttctccttgaaaccccattcgctgggttttaagttaactccaatagaggttggaatttggagtttgataaactggttgtatctgcaagcaatgttgatcaactgggaaatcaaagtaacttatcctttaatcccctttctccctctcgatcaaaggagagacgacatacaatatcagtatttgtgggggatgaaagtggaatgattaatcgaatagcaggggtctttgccagaagaggttataatatcgaatcactcgctgttggattgaacaaggacaaagctctcttcactattgtagtttctggaacggataatgtgttgcagcaagtgatggaacagcttcaaaagcttgtcaatgttttgaaggttgaagatatatccaaggagcctcaagtagaacgtgaattgatgcttgtaaaagttggagctgatcggaataaccgtgctgagctgatgtggttggtggacatctttcgtgccaaaattgtggacatatcggaagagtatctttcaatagaggtcactggagatccaggaaagatggttgctgtccttagaaacctaagcaagtttggcattaaagaaattgctcgtaccggaaagattgctctaagaagggaaaaattgggtgagtctgctcctttctggcgtttttctgctgcttcttatcctgatcttgaagaagctatccctatggatgctctttctggagtttccaaaagagcagctgctgctggatcatcggattcgtctgtggagggtgatgtttatcccgtggagccgtttgatggtttctcccctccaatcttagatgctcattggggtattttgaatgaagaagatactagtgggatgcggtcacacactctatctattcttgtcaatgacaaacccggggtccttaatgttgttacgggggtttttgctcgaaggggttataacattcagagtttagctgtgggtcatgcggaaggtgagggtctatctcgtatcactactgttgtacccggtacagatgaatcaattagcaaattggttcaacaaatctacaagctggttgatattcatgaggttagagatcttacccattatccatttgctgagcgagagttgatgttgataaaagtagctgtgaatactgctgcacgtcgtgaggtcctagacgttgccagcatttttagagcaaaagctgttagatgtatctgatcacaccataacacttgagctcactggagatttgaacaagatggttgctctacagagattgctcgaaccgtatggaatctgtgaggttgcacgaacaggacgtgtggccttgagtcgagagtctggtgtagactcgagatatctccgtggatactctttccctgtgtaacagttctgtcaaaacgtatgatgtaaaaagccttggttattttttttgttttacgaaattgtctccagattttgatcctttgaatttgtgttcttgaagaatatttgcaagtttggaccacatctgaaactttgttttagtgaaatgagagaccatcttctacctggtgaaaagcagttatacaaaaaaaaaagaaaaaaaaacaaaacatgtcggccgcctcggtctctactga

SEQ ID NO: 1710 - DNA, 1560 bp, Amaranthus rudis
ggtataatcaataggattgccggcgttatttctaggagaggatacaacatagagtctctggctgttggtttaaacaaggataaggctctttttactatagtagtgtgtggaactgacaaggtgttgcgccaagtcgtggaacagcttaacaagcttgttagtgtcttgaaggttgaagatctatcagagagccacaagtggaacgtgaactgatgcttttaaagcttaattctgatgcaaattcccacgcagagctaatgtggctagtggacatcttcagggcaaaaattgtggatatctcagaaagcttggtcactgttgaggtgaccggagatcctggaaagttggctgctgtcctaagaaattttagaaagtttggaatcaaagaaattgcaaggaccggtaagattgctctaaggcgagaaaagatgggtcagacagctcctttttggagattctctgctgcttcttatccagatctacaagaaaaggctgttgatgctcttgccaggcctatgaaacggagcgtcaatggtgattctggctcatcttcaagtggtgatgtttatccggtggaaccttatgatgtttcgatggtaaatcaagtacttgatgctcactggggcgtactttatgacggtgattcaagtggtctccggtcacatacgctgtccatgctggtaaataatgctcccggagttcttaacactgttacaggagtaatttctcgtaggggttataacattcagagtcttgctgtaggccctgctgaaaaggagggtctttctcgtatcacaactgtcattcctggaaacgatgagtcgattggaaaattggttcagcaatttaacaagttagtagaccttcatgagattcaggaccttacgcaccagccattttcagagcgagagcttatgttgatcaaaatagctgcaaatactacagccaggagagatgttcttgatattgctaatattttccgtgcaaaagctgtggatgtttcggatcacacgataacattacagcttacgggtgatttacacaaaatggttgcgctacaaagattattggagccttatggcatttgtgaggtggcacggacaggaagagtagcactgagtagagagtctggggtcgattctacatctttacgtggatacgctcttccattgtacgaatgaaaaatctccggctatgtctttccgtcaatatcatgtccatttccttcagcacgtctgcactacatttacatagcgatcaatcgcccgtcaaccagagtgaaggaaagcagtatttctgacctttgctttgaacatgctattttgtataataggaataattttgtattggttatatttgctaatacccagtagtaatattgttacctcgagttcgaatatctgaaacatactttttctcttgaatgcgtagagaacattagcacggtctcttggccggataacacgcattattcaagaaggaattaggattgtaaacagttccaaacactagtgttttcgcgttgggaaaacaaaagaaaaaaaacaaaacatgtcggcc

SEQ ID NO: 1711 - DNA, 341 bp, Amaranthus rudis
ggtataatcaataggattgccggcgttatttctaggagaggatacaacatagagtctctggctgttggtttaaacaaggataaggctctttttactatagtagtgtgtggaactgacaaggtgttgcgccaagtcgtggaacagcttaacaagcttgttagtgtcttgaaggttgaagatctatcagagagccacaagtggaacgtgaactgatgcttttaaagcttaattctgatgcagatacccatgctgagataatgtggttagtggacatcttcagggcaaaaattgtcgatatgtcggaaagcttcgttactagaggtgactggcgatcctggaaa

SEQ ID NO: 1712 - DNA, 7847 bp, Amaranthus rudis
gtatctgcaagcaatgttgatcaactgggaaatcaaagtaacttatcctttaatcccctttctccctctcgatcaaagtatgttatttttcccttttttgattaatttcacaatgttagaatctgggtttggcttgttgttttaatttctactagttaattttgtttttcattatgttataaaatttttaaatgaaaatgagtaatcatttaatttatgaacaattgttgtcactcgtgctagcctgaaggattgggaaaattagtcaattatgaatctggtatatttttcattgatttgtgtgttttgttgcatcttgcatgtagtttgttcatccatttgatttttatacaagagagcgtgcaaaatttagcatgttttcagttcttaaattgatcactgcctgtattttattagcgtaccccattaaaacgactcattaaatcactttttttatttgggtgaagatgtttaagatctttgctacaaagatttgatcggaaacagtctctttgttattatcactaataagggtaagattgtatacattagactccaaaccgcacctaggtctgggggcactaaatagcattggggtaatgaaatgttgttggtgtatttttgtaatgaataccaaacaagctgttaagtatagatactttccctgcaataatacaagagtttatgaggctcttgttcaaaccagcacaagtttattgaaagatttatcagtagtttttttgtgattcataatcttttaagtaccaagcaaagctctttatgacatggaaacccgctgcaatctaattgacctagtgctaaaagctgcttgatttgcttattgccttaagtgaaaatttatagcaagcgttttggaggaagaaaagcaaaagatcgatatgctttcatgtcttcagaaaattagttccgaagttgtggagtataatagagttcaattattgtttgcatttagatctaccttgatttgatatacaacaacaatgtcatatccttattcctaaaagattaaattctactacatgaaccaatatgctatcattttgagtaattgtccttctctattcatttcgattttctaccactcaacttataagtctaaatctttcatatgcttttccactcctggtcatctttgctcttcctcaccttctttttaagtcttccgatttgctactttctatccttcttatcggttcacttataccacatctttgcatatgcctaaacaatctttaacaattctctagcgttgttttctcaaaatttgcgactttcaagcctttttttacatattttttttcgaattctatcactcaaggtataccgctcatccaccaaagcattcgcctttctggtacttctatctttctactatgatcctttctaaaagcccgcgttcagatgtatatagtagcgttgatctaatggtgtaaaacttaccttttagctttagggtcacacctcgatcacctaatgtcctagtcgttcttcttttgccaccgacactttatttattgtgtcacatcttgttggatattaccataactctagaatcatacccaaggtatttgaaacatctacttggagtaatttctttctcttccaacattataatgtcgatttatgtgatttgtgctaaagtgacacttcatgtaccctatcttccatcgacttaatttaaactatcgtgacttcaactcttgtcttcatcgttataacttagcttctacccattccgcgacttcattttcatctaccttgatataccttgatatagcttatcattaatatttttctcataataattcaaaagtttgcatctatctaattttagtgctacaagtgttgcttgtagtaattctgtcttgttagattgtggtgtgtgaactatgtatttttcgtgaattgttgcatttcttgaatgacttgtctctagaatgatgctccttaaacttacttcttttgtttcatgtatgtttaagggagagacgacatacaatatcagtatttgtgggggatgaaagtggaatgattaatcgaatagcaggggtctttgccagaagaggttataacatcgaatcactcgctgttggattgaacaaggacaaagctctcttcactattgtagtttctggaacggataatgtgttgcagcaagtgatggaacagcttcaaaagcttgtcaatgttttgaaggttattttcctttagaataattgccgtggcatccatgtcttcaattgtttagaattctcatcactaagtacaacttatacatataggttgaagatatatccaaggagcctcaagtagaacgtgaattgatgcttgtaaaagttggagctgatcggaataaccgtgctgaggtacctaataatatatgtcacagtacccaactgtacaaaatagttgatcttattagatacagacagatatattagctagatctctatgttttttgtggtgactattgactttctgctacatgctgatctttcttagttttctcctagtaaattgtaatttttaatatataatttgttattccactatgtctgttcctgatttactttcactgatcatattgttcgtgtttcttctattgtagctgatgtggttggtggacatctttcgtgccaaaattgtggacatatcggaagattatctttcaatagaggtaatcacaggatatttcataaaatcaatgttggttttgggaatattgtgactgcagttttacttagacaagtatcaatgtttcaggatgttctacaggttaagtgtttaatgtacattttcaacaagctacttgatgcacttctctgatgacgtgtaaaattgtaatgtacatattgcacactgaattgaaaattttggaagaagggacattaaaatgatttatgacctaatattgctgtatatatacatgcttatatttcttcaagcagcttaagaaaatttattatattgtttttcctcctttagtgaaaaaagttcagtgagataaaagtttcatctttcatgtttagtaaacaagtttagtgaagactgaagagaacaaaatttgtactttttaatggttttatattttttgttaattttgtaagctaatatggaaactataagactgtagttgtttttgtttagctcttttcacttttacgtttgagttgtttttcaatgatcacatgcttaataaagtaatttacctagcaccttgaatatccaggtcactggagatccaggaaagatggttgctgtccttagaaacctaagcaagtttggcattaaagaaattgctcgtaccggaaaggtttatttttattttttttgagaattttttttatctttgtttaagagctctttaagtttccatattacataataaatctgaatgtcttagatataaaacttttgtttattgtttgtccagggtttatatatttttaatatgaagtaaagtttaatttctaacagattgctctaagaagggaaaaattgggtgagtctgctcctttctggcgtttttctgctgcttcttatcctgatcttgaagaagctatccctatggatgctctttctggagtttccaaaagagcagctgctgctggatcatcagattcgtctgtggaggtgtgtttcttatttgttcattgctcacattcctaatattttgagagttgaatccacacatttctttcttgttgtacaattctttttgtttcttgtttccatctgcccatttacatgattgcatctttaattatattattattgctttcactaaatggaacaccttgatgttgtgctttccaaaacgaacgtttttattcaaatccattcctcaataccagtaataaaccggattaaaagtgaaccactattatgggaggttttagggtatattatggattccgattaaaacatagttaaatcctaaaaggtagtaattggctatgttatctggactcgggaactcatgtgatatgtgtcggagtgtctgattcggctaagttaaggaaaaatacaataacttttgtccaaaataaagtgtccaagtgtcgtgcccaagtccgaatgttgaggatccgacatgggtacttgagttaaaaattaaaatgaagagttcgggtaacaaatgtaattgattaaaaaacctatagttgccaaatttttaaactttttaaggtagttgggaaaatttccttttattgaaaaaactttgggaggacaatattttgtgaatgtgtctcgagacatggctcttatgttaaagggcttcaagactaataggtaatggtggatatgtcgaatgcgggtgtgcaggcaggttgcaggtcaaatatttccacagcctgtcgttggtgtgcttttcacttctagcaatttacagcaaattagtagcaaatttacaacaaatttacagctgattgtaagctcaataacccatcatgacataaatactaaaatataacatatgtttaactacaaaatacaattcagaatcatcaaattacaatttagctgtttcatatacatacactaaatatttctgtgacccaacttcaattcaatctcttagtatcataaatttaacaatcaaacacaacaaaagtataaagttagaatgggagtactgcatgtggattgtctctcagctaaagtcctgcagcagctttgcacattatctggtgagacattggatatgagtgagagctttgggataaatatgcacagaaatacttctcttcttgccatgcccaggctcatactgcagcttcaggaaaatgaaggtcctgtatgatttttagaaactccaccaaattctgaagattaaactcacctcgctaagcaacattgagatatcttcagtatattcgcacctatctgatacctcactatgagatctctataaattcagcttcactaagacaagcccaaaatgaaatttctaactaatagccattttcagcaactttttatgcagattccaaactatccattatccataaacttaaatatatcccatttttatgacatttttgatgcctcttgtatgctaattttttctaactatatacactaccacaaaacacaaatctatgcttactctaaataagtttaatatgaactacattttatttttagtgactacggcttagaagtatatcttagaacaacttacattgtagattaatatgacataatcttttatcaatctatacctcctcaggacaagtaagataaaagaactctaatgtacaaaatttaattgatttttttgaaaaaagatacaagaaaatggaagaggcaacacaggcaaagaaggcttctcgatcctctgagcactctaaaccttgcaatactacagtgaactataaaaaaagacaagaaagttcagaaatcatcaaaatattttcccctaaaaaggttcaacatcatcttcttcctcttcttccacaatctcgaatgtcatgttcatctaaaagcctatccctgtcctcaatggtgttgtacatagcaggccttggaggcacactaatgcttgcactgcttttgacttcaaggaactttgagtagcaaaaattgtcttttcaccttggccaaagggagatttgcaagtcacagtactcactggaatgtatataaaataactttaatgataaaagacaatgaaaatgatttttgtgcatttaaaaagatgtttttaagtgactattttttttctagggtttatcttttctattccttctctctcttttaatatgtaaatggaatttacgttataggttgaaggtcttattaatcaggatgacatcttgagcaaattggttcacattctagtctagatgcttcgaggccatggaatggagccatgtcccacagtttctatgtctttaatcctaggggtcacgtgccaatcttttcacctagattatacgcaactaaaatttcctaagagtaagagaaactttagcttcttagtaaatcaaagttatctaaatttgttagattaagagctaatatttcttttagctgtttaacacgttaacctcagttcttttaggtttgagagcaaccttttgcacctaggagtccatgtccttcatttttctgtccatcaggtttttattttcaagctcttttgtaaaatctgaatgagcccctagccgcattcatatcaccttacttatggcatcctttagcctaaaatgtttgaagcaatagggaatcctctactttggatagtacaatgttgcacaatctctgcttgcttttatgtgtatgcaattcttaagattagaccgtctttttaaagaagaagaaacatttactagcgaagatataaaaaatacagagggtcactgaatctttattagtgggcttttagacaacaaactaagtggacacattaggttaaatgacattctttatgcttagcagatcttagacaattcctattcctaaccaaataactatgtcttgagataagagtctatccttaataactaccagattgctgtggtggtacaaagtatcgtgtattaacctgaaacataattggccaccagatcacaaatgaagctcttgtgaaagaaaaggtagatcccattttactcggacccttttcttcctattgcagcttggatctttctgattggaaactctctttgctgctatatgatgttctttaagttctatgggtatcttagctctacaactttatttcctaattcaacaattaccatttcccacctgctccaaatattattacttgaagaattttggctgcttgtataagtatgtttggtccttgaactacattatgtctccccccttcccgagcattttctgttaagggttttacttttctgatgaattatcatgtctgcttcggagttgaactcacatcaatatcttgaagggttttatcctctattttttagggtgatgtttatcccgtggagccgtttgatggtttctcccctccaatcttagatgctcattggggtattttgaatgaagaagatgtaagctactttcctttctcttttatttctctcgggttgtttattttctagttcaattgtttgccttttgtgttcattttcgatggatacatagttttatcattctccagtttcaaattttaatggatgcaacaaaatgactctttaaattatgtgcacagtttcgatggatacacaattttgttttctctaagtctagggttgtgcatttatgcaaagtttctatttgatgtttgctattaagggtcaattagaaacagtttctttgtttctataaggataaggttgcatatgtgtggctctccaaaccccacgtagatgggagattaggtgggagccaatttatagcgttggggcaattgaaagttgttgtctattgtttgctctccaaggattttaattgctcaagtttgtgaatgatgcatttcatagttctcattaagaatttgacttcagagtagaaaactccctcccataaggttctgctatggtttgagttagctgtgcatttattttaatttgtagggaagttgatgtatccttcatactttttgttcattggtatcatgtatataattgagagcaccgagttaaatttagccgacacattccattttttggggacttttggaaaagagaggcggatggactgctttcgagtagagtataagaaagagactctttctttgaactgatttctatcaagatctttataaatttttcctattatcgcccctatgccctctttatattttacgaagtacttaacttttatatcgatggttagattgtggt

SEQ ID NO: 1713 - DNA, 4818 bp, Amaranthus rudis
agcagtttatatgtttgttgaactgtatactgtataatggctgattcaaatgtggaagttgatatgatccttttaagttttaaggtgtagggagaagttgtttcttcaattcagtaatgatagagtatataatatatgatccttggttttcgaccatatcacatgttcgaatctagcctcatatataacatatcttgaggcttccaccatcagcttaaacttcggttgagttggttccctgtgaacttctcgccttcgcttcacctttatgcttggtttcagccttgcaaagttgctagtcgtggagagggttacttcaggaaggctgtcagcatatatcactggcactgcatatctttttgaatacaaaatcatttttaaggaaatgactcttccatttatgtgtacttatttatgtaaagttgcaaatgatgtttgctaccaagagtcaaccggaaaaaacttctttgttatcaataacaagggtaatattgcgtacattccccctaaatcccaaaccccagcctagttggaagccactgaattgcaatagtgtaatggaaatgttgttctatatatatttggttatcttaatgtatcttgttatctacacctgcttctcaggtaataaaacagattcaaaatctgatatttcatgtatttcattttgtgtatacagagtgatgcgtcacacaatttctgtctttgttggcgatgaaagtgggataatcaataggattgccggcgttatttctagaagaggatacaatatcgagtctctggctgttggtttaaacaaggataaggctctttttactatagtagtgtgtgggactgacaaggtgttacgtcaagtcgtggaacagcttaacaagcttgttagtgtcttgaaggtagttaatttcatttgttcatccttttattggtaaatggtgatagtcatactatgacatagtgcttggttcagtactgtacggattgcgttcgataaaattactttacaagtcttataaacccattttccaaactagcttatacaaacaaaacatatcgtgaatttttttttacttaaatagaaatgttattgtttaatatggagccttacgtatcaagcaatataatggatcatcttatatgcatatgtttgtacaatgtacatgttttgttggattgtctaattgtcctatataacatccttagacgattactgcattgcttgtaggttgaagatctatcgagagagccgcaagtggaacgtgaactgatgcttttaaagcttaattctgatgcaaattcccacgcagaggtagattcacaaattcaatcaataatctatgaaggctatattttccatgttttaagttctaatttcctcgtctagttgtcagttagagtctagcaaggaacaaaagatagagatgttttgctttagcttttatccatgatcaaaaaatatgctatacttcatataaggccatgactgttacaacaacaacaacaacaatgccagagccttagtcccaaaagttcatagatgttagataactcaaatttatctagaagtacatcgtgttgtgtgaagctcttataagaagttgcagtagtgtttttgtgagaaatctaataccaattaacgtaaatcttcaatttttgatcttcagctaatgtggctagtggacatcttcagggcaaaaattgtggatatctcagaaagcttggtcactgttgaggttagtggtgtctttgtttgatttctcgcgtacgtcttctaagcgtaccttccagaagttgacctgagatctgaccagtcgatgtaaaatttttttcttagtggcattttctttggtgttgcaggtgactggagatcctggaaagttggctgctgttctaagaaattttagcaagtttggaatcaaagaaattgcaaggaccggaaaggttagtcttttagacatttgctgtaagttcagtatagaattcggaaaggcgcaaagagtacatgtcaactattgtggctagccaggcaactattgtgcatttctggtgagatcaatgtgaaacaagtttagttaactacttgttttgttttatatacttaatatgatagattgctctaaggcgagaaaagatgggtcagacagctcctttttggagattctctgctgcttcttatccagatctacaagaaaaggctgttgatgctcttgccaggcctatgaaacggagcgtcaatggtgattctggctcatcttcaagtgtaagtgaaattttatcttctcgacaattatctttttccttttctcaccttgcattgcctatgtatactttttaccttgtattgcctatagacttaaacatgcttttattttttgaagggtgatgtttatccggtggaaccttatgatgtttcgatggtaaatcaagtacttgatgctcactggggcgtactttatgacggtgatgtaagtgctctatcactacctgaattgtctgtcactaggtcgtccaatggtccatgtgatgtcatgttcaaatctcttaggccaatgtttcctaatttagttccaaatcaattgtctgaattcacgattcacccaaaatggcctaaatttttcgttttaatttacaaatgaccgagtcatgacaaacatgtattaaggtctgctctatgttacttggactcgggtactgagtcggatactggtacgtgtccaagtgtcatatgcgtctcaatattcaattttacgcctaaaaggaagtgtctaagtgtcataccaatgtccgagcatcaatgatcggtcactggtacgtgaagcaaaatgaagagtctgagtaatagcggttcaatctcatttggattttggagggttaaggtttatgtttttgggttttcagatgttcgtctttctgttattcatgtttaattttaagaatgaaagttagttcaacttttcaattttttgagctgcacagtactataaattggttttagtctgctctgctagtatcctgatttgcttcgttcttcatgccagtcaagtggtctccggtcacatacgctgtccatgctggtaaataatgctcccggagttcttaacactgttacaggagtaatttctcgtaggggttataacattcaggtcagtgtggactctgactgcagcaagaaagtatataaagccgtttgtgttatgtaatgacaatcgtccccttttcatcctcttcagagtcttgccgtaggccctgctgaaaaggagggtctttctcgtatcacaactgtcattcctggaaacgatgagtcgattggaaaattggttcagcaatttaacaagttagtagaccttcatgaggtgagcaactatttatacttctgatgttttttttttttgaataatttgcaatttacaagttacaaccataaagttaaaacttcatgttaagcatgcacacccgcgtaatatttttttttgggcaaatttcagcataaaagttttttcgaaatgatgtttaagcttgttgtacttcaatgactcgatgaagagaatttgcgtttaaagagagagggagaatgttggatacaaagtgagagaataggtagttcttttgaattggaggagagtagtgattgatttagtcaaacacaattagtgacggtcaacaactgctcggtgagttaaaaaaatttagttgttaatcgggctgaaatcggtgagctggtagcaatcaaatgcccgagctctctttcatgggtcgtaagtggtataggccatgtcccttgtttagtgggtcaaagatttatagttctttggtttcaaattatgataaactatattaagatgaccgactaaaatcatgtgcacttcttatttacctgaagttgctgatgatctttgcttactaagggtcaatcaaaaacaacatttttgttatcaactaaaaggggaagttgtgtacatctgacccttcaaaccccgcttagatgagagccacttaatgtcaataatggcaataggatgtaataagtggtatagactacatagtaataactttatggttttaagatgcaaagtatccttatcactccaatatgtgctaagaggctcaaaacagaagtggacgagaaaattatgacattaaaagtatacacaattttagatccgcgtttatgacaaactacttgattgattcttgtatttctgaaagcccagttcaatctcctttgtaatatgttgatgctcgttaagttacctattttctttgtaatgcgtaagccatgaagtttgaggtgttatcttagtccaacaacacatcatgctgtttatttataagtattatgaagtactatgaatgaaagcagggtgaactcaggcccggggctgcctaggccatggcccgagtcatttgattaaaaacgcttacaacacagaaaaatagtagtcgggttggttcaacattcatgcaataattccaagatatgataatctaacttcagaatggttgctgctgcagattcaggaccttacgcaccagccattttcagagcgagagcttatgttgatcaaaatagctgcaaatactacagccaggagagatgttcttgatattgctaatattttccgtgcaaaagctgtggatgtttcggatcacacgataacattacaggtactaagccgtaggcacacaatttttgccatgttccttgttttttcctaatatttccgacttggtcttttccagctcgccaatatgttgggattaaggctttggcattattgtgttatttttgcgttttttccaacttccttatattgggattaa

SEQ ID NO: 1714 - DNA, 1687 bp, Amaranthus rudis
  unsure (1)..(1687): unsure at all n locations
ttttttgagctgcacagtactataaattggttttagtctgctctgctagtatcctgatttgcttcgttcttcatgccagtcaagtggtctccggtcacatacgctgtccatgctggtaaataatgctcctggagttctgaacaccgttacaggagtaattgctcgtagaggttataacattcaggtcagtatggactctgactgcaccatgaaagtatatcccgtcttttgcattatgttaacttgattgtccgttttcccttcttcccagagtcttgctgtgggccctgctgaaaaggagggtctttctcgtatcacaactgtcattcctggaaacgatgagtcgattggaaaattggttcagcaatttaacaagttagtagaccttcatgaggtgagcatctatttgtgtacatcgtaggcataattgtccaaattagttagtgtcatgtttacttatgtcgttaatatttaatactattttgatatttgttttttcgactattatgattgaaagattagaatatcttattccggaaagtttgttgtcgcagattcaggaccttactcaccagccatttgcagagcgagagcttatgttaattaaagtagcggcaaatacttctgccaggagagacgtccttgatattgctaatattttccgtgcaaaacctgtggatgtttctgatcatacaataacattacaggtactaagccgtaggcacacaatttttgccatgttccttgttttttcctaatatttccgacttggtcttttccagctcgccaatatgttgggattaaggctttggcattattgtgttatttttgcgttttttccaacttccttatattgggattaaggctttggcgttgttgcattgttgactgttgttgtgtcttttccagcttacgggtgatttacacaaaatggttgcgctacaaagattattggagccttatggcatttgtgaggtatgcgcctatgtattattgttttttctatataatcagattttatttatttatttttggttcgaaatctgttgattgttagttattttgcttttgaatataaatggattatcctgtctgtagattaagaacaatcctgctaaataagaaaatacacacatagaccatagtgcaaaaacacagtaaaggtcgccatcgcggttatagatattgtgatgcggtaatggggatgatgttgtgtggttgttatcataataattcataacgccatatgtcggctgaaaacatgagaagcgatattccttgaaacaacccaaacacggttttctttacctataagcgaatatcggttcgattttttgaaaaattttacaatgctgccctgtttttgcacaatggagacacgagcacgcccacacacacatatatagggaaaggatcatgtgaaaacaaaaaagtggaccatgaaaatggatgagtgagcaataaacgtgaagatatcgtgaagttatccttcaatactataaaatggttttcactagatcatatatacttcacatcttataattgttttatacccttatgtacctcatgtgcatattatatgtgaagttccagataatatttgctataccaagggtcaatcggaaacaaccattgttagtttatcaataaaaaggataaaattgtgtacatcagaccctctaanacc

SEQ ID NO: 1715 - DNA, 1648 bp, Amaranthus rudis
tttggtttattgtattttagttgggcctttatgtttgttagtgggctcttgggttctatatatagggatagtctatcattgtaagtcttgtcttgtattttggaataagaaattcaaaaataaggaggctacacaacactcgaagttgtgtgggtttgtgggagtttacacggcactcaaaggtgtgtagtatatcttgtgtactgttttctttgtgttctttgaattgctcttggtggaaggcaggaagtattacgtaatactaataatactactaataataatattaatagtaatatgcctaagtttctgatatatacaacaaagtaccaaaattggatctcaaaccctttctatacactaactaatgtaagagtgataatccctagtgctgattcgccttttgaattcgcgattcattcaattttgctttttttgatttgtggtggacaagaagattagtgaatcacgtgacactgatttccctttccttcatcttactcataccattttatcctctttccttcatcttactcataccattttatcctctttccttcgtctctcctttggaattcacctctacttatctctatttctatagttttactttttccccttaagtatttactcctacaagcattcccttatacataaagaacactatttacgacaacaatgcttgatgaatagtatttggtgcagtaaatgtagctgccattataaaacacggaggaaatagaatggaaagttagggataaaatgaaacttactataaattataatacgattaaaaaggaaactgagactttctatttggatcacttgcatatatgagtagattaattattgatggtctcactctggaaatgtattctgatctattttgaatgagtcattgaatgagatttttattccggatccaggttagagatcttacccattatccatttgctgagcgagagttgatgttgataaaagtagctgtgaatactgctgcacgtcgtgaggtcctagacgttgccagcatttttagagcaaaagctgtagatgtatctgatcacaccataacacttgaggtaagttttggggagttttattaatttttatttataaatggtgtcccgttttctttcaattcgaaaaggtcaatgtttataaaaagacaaccaacagaatagatgtagctctgttaagtatttgtatgacattgtgctcttaagatatgtaagctgttggattgccttgcaacgttcatatttttgttgtacatcattctgcttttactttacggagcctgattttgattaatggggattttgactcagctcactggagatttgaacaagatggttgctctacagagattgctcgaaccgtatggaatctgtgaggtaagatagtatttttggacaatatagagtttcctgaatggataaaagcattattgtttttatgtttgctgttttctaattgatttccgcaatagaaatgtcaaaattatcctattgcaggtcttattgtcattgatgctccttattccataatgcaatcaccatttgcttatattaaacacaatgtgtacatatctttttgatttcagccataataatccaaagtttacagagaaaaagatgtttcgttcacg

SEQ ID NO: 1716 - DNA, 1125 bp, Amaranthus rudis
atcatccaaggtatttgaaacatacttggagtaatttctttctcttccaacattataatgtcgatttatgtgatttgtgctaaagtgacacttcatgtaccctatcttccatcgacttaatttaaactatcgtgacttcaactcttgtcttcatcgttataacttagcttctacccattccgcgacttcattttcatctaccttgatataccttgatatagcttatcattaatatttttctcataataattcaaaagtttgcatctatctaattttagtgctacaagtgttgcttgtagtaattctgtcttgttagattgtggtgtgtgaactatgtatttttcgtgaattgttgcatttcttgaatgacttgtctctagaatgatgctccttaaacttacttcttttgtttcatgtatgtttaagggagagacgacatacaatatcagtatttgtgggggatgaaagtggaatgattaatcgaatagcaggggtttttgccagaagaggttataatatcgaatcactcgctgttggattgaacaaggacaaagctctcttcactattgtagtttctggaacggataatgtgttgcagcaagtgatggaacagcttcaaaagcttgtcaatgttttgaaggttattttcctttagaataattaccgtggcatccatgtcttcaattgtttagaattctcatcactaagtacaacttatacatataggttgaagatatatccaaggagcctcaagtagaacgtgaattgatgcttgtaaaagttggagctgatcggaataaccgtgctgaggtacctaataatatatgtcacagtacccaactgtacaaaatagttgatcttattagatacagacagatatattagctagatctctatgttttttgtggtgactattgactttctgctacatgctgatctttcttagttttctcctagtaaattgtaatttttaatatataatttgttattccactatgtctgttcctgatttactttcactgatcatattgttcgtgtttcttctattgtagctgatgtggttggtggacatctttcgtgccaaaattgtggacatatcggaagagtatctttcaatagaggtaa

SEQ ID NO: 1717 - DNA, 1029 bp, Amaranthus rudis
ctttctagtctcttcccccctcccacccttcaatagcttatcctttcatgccgtccaacaaaatttgaactcatatccttgtgtatgatcggagaaagtaatgattgaatcattaatgatgctcatccttggtgaatttatctctttttatccagtctttgagtctcctggttcaggaacgctgcctattaatcattccaaatctcttgaataaaagtcattttaaaattatcatatgtatatcattccgtgctgttatttttcttacatgtattttgctatcattagcgtgataaaaaaatgtattttcattcatttccagggtgatgcgccacacaatttctgtctttgttggggatgaaagtggtataatcaataggattgccggcgttatttctaggagaggatacaacatagagtctctggctgttggtttaaataaggataaggctctttttactatagtagtgtgtgggaatgacaaggtgttgcgccaagtaatggagcagctcagcaagcttgttagtgtcttaaaggtagacatcaccttttttcttcctttaaagtttaaggtaactagtgatactttcatttagtaggggcggtcaatggtgatattgatgctaaccatgtatgttcattttgtttatgaaatattgctcattttgactttatcattgttgttaaactctgagaaaatgtaatctctaaagcatctatcctcactttaagatagatagagcagggaaacactcatgattcttttaataaactttcaaaatattaaaattccctttccctaatgcagttttatagctcccagctaatctgagttcaaggggtttgagtgtatgcaagcatactcgtataacaacaaaatggttgtctcggattgacccttaaaatcaaataccatcttgcaaattcacttaaatacatacttcaacgaactgttttatagtagtccattaaaattcgtaagcaaagaattataaaattttttattccgtcgagaatagacacaataaa

SEQ ID NO: 1718 - DNA, 713 bp, Amaranthus rudis
tattctgatgtactttcgacatgccagtcaagcggacttatgtcacatactctgtccatgctggtaaataatgctcctggagttctgaacaccgttacaggagtaattgctcgtagaggttataacattcaggtcagtatggactctgactgcaccatgaaagtatatcccgtcttttgcattatgttaacttgattgtccctttttccttcttcctagagtcttgctgtgggccctgctgaaaaggagggtctttctcgtatcaccaccgttgttcctggaaacgacgagtcaattgcaaaattggttcagcaattaaacaaattagtagaccttcatgaggtgagcatctatttgtgtacatcgtaagcataattgtccaaattagttagtgtcatgtttacttatgtcgttaatatttaatactattttgatatttgttttttcgactattatgattgaaagattagaatatcttattccggaaaggttgtggtcgcagattcaggaccttactcaccagccatttgcagagcgagagcttatgttaattaaagtagcggcaaatacttctgccaggagagacgtccttgatattgctaatattttccgtgcaaaacctgtggatgtttctgatcatacaataacattacaagtacgcataaatgattttgccattttatttagccttctcttgttactctcaacaatgt

SEQ ID NO: 1719 - DNA, 1392 bp, Amaranthus spinosus
ctaccatctccattctccccatttcatttctttctcataactctctaatggcggccatttcctttaacatcaatggcggaaagatcggaactttatgtccaaaacctaaatatggttgtgggtttttgagaaaatgggattttggagctcatacaactgtatctactaaacccatgtcaaaaattttaagcttgaaagcagttgaagtttctgctgatgctacagtaaatgcagtttctgtttcatctaattctagggtgatgcgccacacaatttcagtctttgtcggggatgaaagtggtataatcaataggattgcaggcgttatttctagaagaggatacaatatcgagtctttggctgtttgtttaaacaaggataaggctctttttactatagtagtgtgtggaactgacaaggtgttgcgccaagtaatggagcagctcagcaagcttgttaatgtcttaaaggttgaagatctatctagagagcctcaagtggaacgtgagcttatgctattaaagcttcattctaatgcagatacccatgcagagataatgtggttagtggacatcttcagagcaaaaattgtcgatatgtcggaaagcttcgttactgtagaggtgactggtgatcctggaaagatggctgctgtcctgagaaattttagcaagtatggaatcaaagaagttgcaagaacaggaaagattgctctaagacgggaaaggatgggccagacagctcctttttggagattctctgctgcatcttatccagatctaaaagaaaaggctgttgaatcttttgtcaggcctgccaaaagaaacatcaacgctgatcctggctcatcgtctagtggtgatgtttatccagtggagccttatgaagcctccataaatacagtacttgatgctcactggggcgttctttacgaaaatgattcaagcggacttgtatcacatactctgtccatgctggtaaataatgctcctggagttctgaacaccgttacaggagtaattgctcgtagaggttataacattcagagtcttgctgtgggccctgctgaaaaggagggtctttctcgtatcacaactgttgttcctggaaacgacgagtcaattgcaaaattggttcagcaattaacaaattagtagaccttcatgagattcaggaccttacgcaccagccatttgcagagcgagagcttatgttaattaaagtagctgcaaatactacagccaggagagatgtccttgatattgctaatattttccgtgcaaaagctgtggatgtttcggatcacacgataacattacagcttacgggtgatttacacaaaatggttgcgctacagagactattggagccttatggcatttgtgaggtggc

SEQ ID NO: 1720 - DNA, 579 bp, Amaranthus spinosus
ctaccatctccattctccccatttcatttctttctcataactctctaatggcggccatttcctttaacatcaatggcggaaagatcggaactttatgtccaaaacctaaatatggttgtgggtttttgagaaaatgggattttggagctcatacaactgtatctactaaacccatgtcaaaaattttaagcttgaaagcagttgaagtttctgctgatgctacagtaaatgcagtttctgtttcatctaattctagggtgatgcgccacacaatttcagtctttgtcggggatgaaagtggtataatcaataggattgcaggcgttatttctagaagaggatacaatatcgagtctttggctgtttgtttaaacaaggataaggctctttttactatagtagtgtgtggaactgacaaggtgttgcgccaagtcgtggaacagcttaacaagcttgttagtgttttgaaggttgaagatctatcgagagagccacaagtggaacgtgaactgatgcttgtaaagcttaattctgattcaaattcccacgcagagctaatgtggctagtggacatcttca

SEQ ID NO: 1721 - DNA, 497 bp, Amaranthus spinosus
ctcatcaggccgagttagctgtgtttcaaatttccatccatggaggctgtgtcgactcacctttcaacgagttttaactccattccgaaaagcaatagattgagccaccaaactgcaaaacgattagggttctccttgaaaccccattctctgggttttaagtttaactccaatagtgacaggaattcggagtttgataaactggttgtatctgcaagcaatgttgatcaactgggaaatcaaagtaacttatcctttaatcccccttctccctctcgatcaaaggagagacgacatacaatatcagtatttgtgggggatgaaagtggaatgattaatcgaatagcaggggttttgccagaagaggttataatatcgaatcactcgctgttggattgaacaaggacaaagctctcttcactattgtagtttccggaacggataatgtgctgcagcaagtgatggaacagcttcaaaagcttgtcaatgttttgaag

SEQ ID NO: 1722 - DNA, 495 bp, Amaranthus thunbergii
tctctaatggcggctgtttccttcaatattaatggtggaaagattggaattttatgttcaagacacgaattcggttgtgggtttgtaagaaaattggattttagaactcatacttctatatttgaaaaacatatgccaaaaacttcaagttttaaagcaatggaagtttctgcaaatgcaacagtaaatatagttccagtttcagctcattctagggtgatgcgccacacaatttcagtctttgttggggatgaaagtggtataatcaataggattgccggcgttatttctaggagaggatacaacatagagtctcttgctgttggtttaaataaggataaggctctttttactatagtagtgtgtggaactgacaaggtgttgcgccaagtaatggagcagctcagcaagcttgttaatgtcttaaaggttgaagatctatctagagagcctcaagtggaacgtgaacttatgctattaaagcttcattctaat

SEQ ID NO: 1723 - DNA, 1729 bp, Amaranthus viridis
ctaccatctccattctccccatttcatttctttctcatctctctccaatggcggccatttcctttaacatcaatggcggaaagattggaactttatgtccaaaacctaaatatggttgtgggtttttgagaaaatgggattttggagctcatacaactgtatatactaaacccatgtcaaaaatttcaagcctgaaagcagttgaagtttctaccaatgctacagtaaaatgcagtttctgtttcagctaattctagggtgatgcgatcacacaatttctgtctttgtcggggatgaaagtggataatcaataggattgcaggtgttatttctagaagaggatacaatatcgagtctttggctgtttgtttaaacaaggataaggctctttttactatagaagtgtgtggaactgacaaggtgttgcgccaagtcgtggaacagcttaacaagcttgttagtgttttgaaggttgaagatctatcgagagagccacaagtggaacgtgaactgatgcttgtaaagcttaattctgatgcaattcccacgcagagctaatgtggctagtggacatcttcagggcaaaaattgtggatatctcagaaagcttggtcactgttgaggtgaccggagatcctggaaagttggctgctgtcctaagaaattttagaaagtttggaatcaaagaaattgcaaggaccggtaagattgctctaagacgagaaaggatgggccagacagctcctttttggagattctctgctgcatcttatccagatctacaagaaaaggctgttgatgatctggccaggcctacgaaacggagcatcaatggtgattctggctcatcttcaagtggtgatgtttatccggtggaaccttatgatggttcgatggtaaatcaagtacttgatgctcactggggcgtactttatgacggtgattcaagtggtctccggtcacatactctgtccatgctggtaaataatgctcctggagttctgaacaccgttacaggagtaattgctcgtagaggttataacattcagagtcttgctgtgggccctgctgaaaaggagggtctttctcgtatcacaactgttgttcctggaaacgacgagtcaattgcaaaattggttcagcaattaaacaaattagtagaccttcatgagattcaggaccttacgcaccagccatttgcagagcgagagcttatgttaattaaagtagcggcaaatacttctgccaggagagacgtccttgatattgctaatattttccgtgcgaaacctgtggatgtttctgatcacacaataacattacaacttgctggtgatttagacaaaatggttgcgctacagagattattggagccttacggcatttgtgaggtggcacggactggaagagtagcactaacgagagagtctagggtagattccaaatatctacgaggatacactcttccgttgtatgaatgaaaaactcgggctatgtctttccgacattaccttgtctgattccttccgctcttctacactgcattgcaagcagaacaattgcccacaagtggagtaaattaaaaggggaaacaacaataccgatctttgctttgaagatatactgatttgtataacaatagagtttgtatttgactagtatttatttgctcaacgctgtaataacatatccccttgaggtttgatatatggaaggaaaaattacccag

SEQ ID NO: 1724 - DNA, 1726 bp, Amaranthus viridis
ctaccatctccattctccccatttcatttctttctcatctctctccaatggcggccatttcctttaacatcaatggcggaaagattggaactttatgtccaaaacctaaatatggttgtgggtttttgagaaaatgggattttggagctcatacaactgtatatactaaacccatgtcaaaaatttcaagcctgaaagcagttgaagtttctaccaatgctacagtaaaatgcagtttctgtttcagctaattctagggtgatgcgatcacacaatttctgtctttgtcggggatgaaagtggataatcaataggattgcaggtgttatttctagaagaggatacaatatcgagtctttggctgtttgtttaaacaaggataaggctctttttactatagaagtgtgtggaactgacaaggtgttgcgccaagtcgtggaacagcttaacaagcttgttagtgttttgaaggttgaagatctatcgagagagccacaagtggaacgtgaactgatgcttgtaaagcttaattctgatgcaattcccacgcagagctaatgtggctagtggacatcttcagggcaaaaattgtggatatctcagaaagcttggtcactgttgaggtgaccggagatcctggaaagttggctgctgtcctaagaaattttagaaagtttggaatcaaagaaattgcaaggaccggtaagattgctctaagacgagaaaggatgggccagacagctcctttttggagattctctgctgcatcttatccagatctacaagaaaaggctgttgaatcttttgtcaggcctgccaaaagaaacatcaacgctgatcctggctcatcgtctagtggtgatgtttatccagtggagccttatgaagcctccataaatacagtacttgatgctcactggggcgttctttacgaaaatgattcaagcggacttgtatcacatactctgtccatgctggtaaataatgctcctggagttctgaacaccgttacaggagtaattgctcgtagaggttataacattcagagtcttgctgtgggccctgctgaaaaggagggtctttctcgtatcacaactgttgttcctggaaacgacgagtcaattgcaaaattggttcagcaattaaacaaattagtagaccttcatgagattcaggaccttacgcaccagccatttgcagagcgagagcttatgttaattaaagtagcggcaaatacttctgccaggagagacgtccttgatattgctaatattttccgtgcgaaacctgtggatgtttctgatcacacaataacattacaacttgctggtgatttagacaaaatggttgcgctacagagattattggagccttacggcatttgtgaggtggcacggactggaagagtagcactaacgagagagtctagggtagattccaaatatctacgaggatacactcttccgttgtatgaatgaaaaactcgggctatgtctttccgacattaccttgtctgattccttccgctcttctacactgcattgcaagcagaacaattgcccacaagtggagtaaattaaaaggggaaacaacaataccgatctttgctttgaagatatactgatttgtataacaatagagtttgtatttgactagtatttatttgctcaacgctgtaataacatatccccttgaggtttgatatatggaaggaaaaattacccag

SEQ ID NO: 1725 - DNA, 1565 bp, Amaranthus viridis
ctaccatctccattctccccatttcatttctttctcatctctctccaatggcggccatttcctttaacatcaatggcggaaagattggaactttatgtccaaaacctaaatatggttgtgggtttttgagaaaatgggattttggagctcatacaactgtatatactaaacccatgtcaaaaatttcaagcctgaaagcagttgaagtttctaccaatgctacagtaaaatgcagtttctgtttcagctaattctagggtgatgcgatcacacaatttctgtctttgtcggggatgaaagtggataatcaataggattgcaggtgttatttctagaagaggatacaatatcgagtctttggctgtttgtttaaacaaggataaggctctttttactatagaagtgtgtggaactgacaaggtgttgcgccaagtcgtggaacagcttaacaagcttgttagtgttttgaaggttgaagatctatcgagagagccacaagtggaacgtgaactgatgcttgtaaagcttaattctgatgcaattcccacgcagagctaatgtggctagtggacatcttcagggcaaaaattgtggatatctcagaaagcttggtcactgttgaggtgaccggagatcctggaaagttggctgctgtcctaagaaattttagaaagtttggaatcaaagaaattgcaaggaccggtaagattgctctaagacgagaaaggatgggccagacagctcctttttggagattctctgctgcatcttatccagatctacaagaaaaggctgttgatgatctggccaggcctacgaaacggagcatcaatggtgattctggctcatcttcaagtggtgatgtttatccggtggaaccttatgatggttcgatggtaaatcaagtacttgatgctcactggggcgtactttatgacggtgattcaagtggtctccggtcacatactctgtccatgctggtaaataatgctcctggagttctgaacaccgttacaggagtaatttctcgtaggggttataacattcagagtcttgctgtaggccctgctgaaaaggagggtctttctcgtatcacaactgtcattcctggaaacgacgagtcgattggaaaattggttcagcaattcaacaagttagtagaccttcatgagattcaggaccttactcaccagccattttcagagcgagagcttatgttgatcaaaatagctgcaaatactacagccaggagagatgtccttgatattgctaatattttccgtgcaaaagctgtggatgtttcggatcacacgataacattacagcttgcgggtgatttacacaaaatggttgcgctacaaagattattggagccttatggcatttgtgaggtggcacggacaggaagagtcgcactgagtagagagtctggggtcgattctacatctttacgtggatacgctcttcctttgtacgaataaaaattctccggctatgtcttttcgtcattattatgtcccatttccttcagcacgtctgcgctacatttacatagcgatcaattg

SEQ ID NO: 1726 - DNA, 1562 bp, Amaranthus viridis
ctaccatctccattctccccatttcatttctttctcatctctctccaatggcggccatttcctttaacatcaatggcggaaagattggaactttatgtccaaaacctaaatatggttgtgggtttttgagaaaatgggattttggagctcatacaactgtatatactaaacccatgtcaaaaatttcaagcctgaaagcagttgaagtttctaccaatgctacagtaaaatgcagtttctgtttcagctaattctagggtgatgcgatcacacaatttctgtctttgtcggggatgaaagtggataatcaataggattgcaggtgttatttctagaagaggatacaatatcgagtctttggctgtttgtttaaacaaggataaggctctttttactatagaagtgtgtggaactgacaaggtgttgcgccaagtcgtggaacagcttaacaagcttgttagtgttttgaaggttgaagatctatcgagagagccacaagtggaacgtgaactgatgcttgtaaagcttaattctgatgcaattcccacgcagagctaatgtggctagtggacatcttcagggcaaaaattgtggatatctcagaaagcttggtcactgttgaggtgaccggagatcctggaaagttggctgctgtcctaagaaattttagaaagtttggaatcaaagaaattgcaaggaccggtaagattgctctaagacgagaaaggatgggccagacagctcctttttggagattctctgctgcatcttatccagatctacaagaaaaggctgttgaatcttttgtcaggcctgccaaaagaaacatcaacgctgatcctggctcatcgtctagtggtgatgtttatccagtggagccttatgaagcctccataaatacagtacttgatgctcactggggcgttctttacgaaaatgattcaagcggacttgtatcacatactctgtccatgctggtaaataatgctcctggagttctgaacaccgttacaggagtaatttctcgtaggggttataacattcagagtcttgctgtaggccctgctgaaaaggagggtctttctcgtatcacaactgtcattcctggaaacgacgagtcgattggaaaattggttcagcaattcaacaagttagtagaccttcatgagattcaggaccttactcaccagccattttcagagcgagagcttatgttgatcaaaatagctgcaaatactacagccaggagagatgtccttgatattgctaatattttccgtgcaaaagctgtggatgtttcggatcacacgataacattacagcttgcgggtgatttacacaaaatggttgcgctacaaagattattggagccttatggcatttgtgaggtggcacggacaggaagagtcgcactgagtagagagtctggggtcgattctacatctttacgtggatacgctcttcctttgtacgaataaaaattctccggctatgtcttttcgtcattattatgtcccatttccttcagcacgtctgcgctacatttacatagcgatcaattg

SEQ ID NO: 1727 - DNA, 1441 bp, Amaranthus viridis
gtctttctttgcaccctggttgtcctcgtcaggccgagttagctgtgtttcaaatttccatccatggaggctgtgtcgactcacctttcaacgagttttaactccattccgaaaagcaatagattgaaccaccaaactgcaaaacgattagggttctccttgaaaccccattctctgggttttaagtttaactccaatagtgacaggaattcggagtttgataaactggttgtatctgcaagcaatgttgatcaactgggaaatcaaagtaacttatcctttaatcccccttctccctctcgatcaaaggagagacgacatacaatatcagtatttgtgggggatgaaagtggaatgattaatcgaatagcaggggtttttgccagaagaggttataatatcgaatcactcgctgttggattgaacaaggacaaagctctcttcactattgtagtttctggaacggataatgtgttgcagcaagtgatggaacagcttcaaaagcttgtcaatgttttgaaggttgaagatatatccaaggagcctcaagtagaacgtgaattgatgcttgtaaaagttggagctgatcggaataaccgtgctgagctgatgtggttggtggacatctttcgtgccaaaattgtggacatatcggaagagtatctttcaatagaggtcactggagatccaggaaagatggttgctgtccttagaaacctaagcaagtttggcatcaaagaaattgctcgtaccggaaagattgctctaagaagggaaaaattgggcgagtctgctcctttctggcgtttttctgctgcttcttatcctgatcttgaagaagctatccctatggatgctctttctggagtttcaaaaggggcagctgctgctggatcatcggattcgtctgtggagggtgatgtttatcctgtggagccgtttgatggtttctcccttccaatcttagatgctcattggggtattttgaacgaagaagatactagtgggatgcggtcacacactctatctattcttgttaatgacaaacctggggtccttaatgttgttacgggggtttttgctcgaaggggttataacattcagagtttagctgtgggtcatgcggaaggtgagggtctatctcgtatcactactgttgtacccggtacagatgaatcaattagcaaattggttcaacaaatctacaagctggttgatattcatgaggttagagatcttacccattatccatttgctgagcgagagttgatgttgataaaagtagctgtgaatactgctgcacgtcgtgaggtcctagacgttgccagcatttttagagcaaaagctgttgatgtatctgatcacaccataacacttgagctcactggagatttgaacaagatggttgctctacagagattgctcgaaccgtatggaatct

SEQ ID NO: 1728 - DNA, 1257 bp, Amaranthus viridis
gaagatctatctagagagcctcaagtggaacgttgagcttatgctattaaagcttcattctaatgcagatacccatgcagagataatgtggttagtggacatcttcagagcaaaaattgtcgatatgtcggaaagcttcgttactgtagaggtgactggtgatcctggaaagatggctgctgtcctgagaaattttagcaagtatggaatcaaagaagttgcaagaacaggaaagattgctctaagacgagaaaggatgggccagacagctcctttttggagattctctgctgcatcttatccagatctacaagaaaaggctgttgatgatctggccaggcctacgaaacggagcatcaatggtgattctggctcatcttcaagtggtgatgtttatccggtggaaccttatgatggttcgatggtaaatcaagtacttgatgctcactggggcgtactttatgacggtgattcaagtggtctccggtcacatactctgtccatgctggtaaataatgctcctggagttctgaacaccgttacaggagtaattgctcgtagaggttataacattcagagtcttgctgtgggccctgctgaaaaggagggtctttctcgtatcacaactgttgttcctggaaacgacgagtcaattgcaaaattggttcagcaattaaacaaattagtagaccttcatgagattcaggaccttacgcaccagccatttgcagagcgagagcttatgttaattaaagtagcggcaaatacttctgccaggagagacgtccttgatattgctaatattttccgtgcgaaacctgtggatgtttctgatcacacaataacattacaacttgctggtgatttagacaaaatggttgcgctacagagattattggagccttacggcatttgtgaggtggcacggactggaagagtagcactaacgagagagtctagggtagattccaaatatctacgaggatacactcttccgttgtatgaatgaaaaactcgggctatgtctttccgacattaccttgtctgattccttccgctcttctacactgcattgcaagcagaacaattgcccacaagtggagtaaattaaaaggggaaacaacaataccgatctttgctttgaagatatactgatttgtataacaatagagtttgtatttgactagtatttatttgctcaacgctgtaataacatatccccttgaggtttgatatatggaaggaaaaattacccag

SEQ ID NO: 1729 - DNA, 1254 bp, Amaranthus viridis
gaagatctatctagagagcctcaagtggaacgttgagcttatgctattaaagcttcattctaatgcagatacccatgcagagataatgtggttagtggacatcttcagagcaaaaattgtcgatatgtcggaaagcttcgttactgtagaggtgactggtgatcctggaaagatggctgctgtcctgagaaattttagcaagtatggaatcaaagaagttgcaagaacaggaaagattgctctaagacgagaaaggatgggccagacagctcctttttggagattctctgctgcatcttatccagatctacaagaaaaggctgttgaatcttttgtcaggcctgccaaaagaaacatcaacgctgatcctggctcatcgtctagtggtgatgtttatccagtggagccttatgaagcctccataaatacagtacttgatgctcactggggcgttctttacgaaaatgattcaagcggacttgtatcacatactctgtccatgctggtaaataatgctcctggagttctgaacaccgttacaggagtaattgctcgtagaggttataacattcagagtcttgctgtgggccctgctgaaaaggagggtctttctcgtatcacaactgttgttcctggaaacgacgagtcaattgcaaaattggttcagcaattaaacaaattagtagaccttcatgagattcaggaccttacgcaccagccatttgcagagcgagagcttatgttaattaaagtagcggcaaatacttctgccaggagagacgtccttgatattgctaatattttccgtgcgaaacctgtggatgtttctgatcacacaataacattacaacttgctggtgatttagacaaaatggttgcgctacagagattattggagccttacggcatttgtgaggtggcacggactggaagagtagcactaacgagagagtctagggtagattccaaatatctacgaggatacactcttccgttgtatgaatgaaaaactcgggctatgtctttccgacattaccttgtctgattccttccgctcttctacactgcattgcaagcagaacaattgcccacaagtggagtaaattaaaaggggaaacaacaataccgatctttgctttgaagatatactgatttgtataacaatagagtttgtatttgactagtatttatttgctcaacgctgtaataacatatccccttgaggtttgatatatggaaggaaaaattacccag

SEQ ID NO: 1730 - DNA, 1090 bp, Amaranthus viridis
gaagatctatctagagagcctcaagtggaacgttgagcttatgctattaaagcttcattctaatgcagatacccatgcagagataatgtggttagtggacatcttcagagcaaaaattgtcgatatgtcggaaagcttcgttactgtagaggtgactggtgatcctggaaagatggctgctgtcctgagaaattttagcaagtatggaatcaaagaagttgcaagaacaggaaagattgctctaagacgagaaaggatgggccagacagctcctttttggagattctctgctgcatcttatccagatctacaagaaaaggctgttgaatcttttgtcaggcctgccaaaagaaacatcaacgctgatcctggctcatcgtctagtggtgatgtttatccagtggagccttatgaagcctccataaatacagtacttgatgctcactggggcgttctttacgaaaatgattcaagcggacttgtatcacatactctgtccatgctggtaaataatgctcctggagttctgaacaccgttacaggagtaatttctcgtaggggttataacattcagagtcttgctgtaggccctgctgaaaaggagggtctttctcgtatcacaactgtcattcctggaaacgacgagtcgattggaaaattggttcagcaattcaacaagttagtagaccttcatgagattcaggaccttactcaccagccattttcagagcgagagcttatgttgatcaaaatagctgcaaatactacagccaggagagatgtccttgatattgctaatattttccgtgcaaaagctgtggatgtttcggatcacacgataacattacagcttgcgggtgatttacacaaaatggttgcgctacaaagattattggagccttatggcatttgtgaggtggcacggacaggaagagtcgcactgagtagagagtctggggtcgattctacatctttacgtggatacgctcttcctttgtacgaataaaaattctccggctatgtcttttcgtcattattatgtcccatttccttcagcacgtctgcgctacatttacatagcgatcaattg

SEQ ID NO: 1731 - DNA, 1616 bp, Ambrosia trifida
ctacctactccgccataatccacactcaaagagcaccttcttcttcttcctaatctacttccatcacccaaacctctagaccgtacaccgaccagtttctctccaacactctcttcaaatcctaacaaaccttatctcaaatcactctctgtgcaagcaaccagtgcttccgtttccaccgcccttgatgccactccatccatggcaagacctaaggtgaggcgccacacgatttcagtatttgttggtgatgaaagtggaatgataaatcggattgcaggagtttttgcaaggaggggatataatatcgagtcccttgctgttggtttaaacaaggataaggctctttttactatagttgtatcgggaactgaaagagtgttggagcaagttatgaaacaacttctaaagctcgttaatgttttaaaggttgaagatatctcaaaggagccacaagtagaacgtgagttgatgctcatcaagataaatgcagatccaagataccgtttggaggtcaagtggttagtggacatatttagagctagaattgttgatatttcagagcactctataactattgaggtaactggtgacccagggaaaatggttgcggtgcaaagaaatttaagcaagtttgggatccaagaagttgctaggaccgggaagattgccttgagaagagaaagaatgggtgaagatgctcctttctggcggttttcagcagcttcatatcctgaccttgaagaaatgaacaaaagaactcctcttcaagccaaaaagagaacagagtatcaggaatctgataagcctgctgggggagatgtttatccagtagattcatctgatgattattcattcaatcaagttcttgatgcacattggggtgttcttaatgaagaagatacaagcgggcttcgttcccacactttatcaatcgttgtaaatgactctcctggagttctcaatatcgtaacaggagtttttgctcgcagaggctataatattcagagtctagcagtcggtcatgcagaagtagaggggcgttcccgcatcacaactgttgtccctggtacagatgagtcaattgcaaagttggttcaacaactatacaagttgatagatgtgcatgatgttgtggatttaacgttgatgccatttgccgaacgagaattgatgctgattaagattgctgtgaattccacggcccggcgcaatgttcttgatattgcaagcatatttagggctaaagccgtagacgtgtcagatcatacaattacacttgaggttactggagatctgaataagatggttgcactgcagaggttgttggaaccttgcggaatttgtgaggtggcaagaacaggtcgcgtggcactgacccgcgagtcaggcgttgattcctcttaccttcgtggatattcctatcctgtgtgatttctatcttttatagcttcttcctgtttcgggtagagattgtcagtaatttgggtgttctttttctatctggtacctagtctaagttgtatgtttttaacaatagatttttgttttttcatccgacttttaagaccctgttttgactctatatgaagttacatacgtaaatacatgctatg

SEQ ID NO: 1732 - DNA, 1597 bp, Ambrosia trifida
cctttgtcgggaaaaccataatgacgaaaacagccaccatttcttctctctcctcggcggctcattgccgccgccacaccatacaaccggtgacactacaacccacaaacctaaaaccattcaataaaaaatgttcagctccttacactctaaaaccacttaatgctatctctgacaacaaatctccggccacattgccacatattcttccccttaacacaccacttacttccaaggtgaagcgtcacacgatctcggtgtttgttggggatgaaagtggtattataaatcgaattgcgggggtgtttgctagacgaggttataatatcgagtcgcttgcggttggtttgaataaggataaggctttgtttactattgttgtctctgggactgagaaggtgttgcagcaagttgtagagcaacttaacaagcttgttaatgtcttgaaggtggaagatctttctcgggatccgcaagtagagcgggaattgatgcttgtgaagcttaatgttgatccaagcacaaaagctgagattatgtggttagtagacatctttagaggcaatgtggtggatgcatcggaatcctcattgactatagaggttactggggatcccgggaagatagctgctgttcagaggaatctagctaagtttggaatcaaagaacttacaagaacaggaaagattgcgctaagacgggaaaaaatgggtgaaactgctccgttttggaacttctctgcagcatcttatccagatctagaagccctgggtcctgttgctagtattactaaagtggttgacgagactcctagtacaacgtcaggggggggcgatgtttatcctgtggattcctacgatagctgctacgtaagggatcgagttctcgatgccaattggggcgtgctatatgacgaagatgcaacgggtcgtcaatctcacactttgaacattcttgtgaataatgctcctggagttctcaacctggtcaccggagttatatccagacggggttataacgttcagagtctggctgtaggtcctgcagaactggaaggtttatctcgcattactactgtgattgccggcacagacgagtctattggcaagttggttcagcagttctacaaattgatagatgttcatgaggtcaaagatatcacctacttaccattttcggaacgcgagttaatgctgatcaaagttgctgcaagccctgctgctagaagggatgtattggacattgccaccatcttccgcgccaagcctgttgatgtttctgaccatactattacgctagaactcaccggagacttcaataagctattcgccctgcaaacgttattggagacctatggaatttgcgaggtcgcaaggactggtcgagtggcattggttagagagtcaggagtcgattctacatatctacgtgggttctctatgcctccaacttgattcaagccgatccgatggttgcaagggtccccatccggtgggctacttttatgttgcgacatgtaactgttacagttattagtctttattgtttgttagcttaatatgttgaagacagtttctagtaatcatatggtttcaca

SEQ ID NO: 1733 - DNA, 3632 bp, Ambrosia trifida
gtcatgtattgcattctatgagactatgactactcagggactattttatcagtttctacaagcttacagtgcttattgtcatgctttatggaagtctatgaagtttattttcgttacagtgcttatggtctaattttgttttgactcaagaaaacctgtatatttgtttgagtgatttttaataagacaaaaatctgtggttgctatcattatgcaatttctgagtaaatttgtttttctagttccaaaacacataatcgtcttaggctcgggacttcacaattttctttttaatctaacatacataatcgtgtttacgactcataatcaatatgatttgctctaatgtaccggtaaaataaacactttgtatcgctttgtgctatcataaagagctgattgcctgatagaagttctaaataaattctttttttttacgttggaatctaggtaactggtgacccagggaaaatggttgcggtgcaaagaaatttaagcaagtttgggatccaagaagttgctaggaccgggaaggtaagtaaatagtgcattcatagtgtattcaaatgcattaaacctcctaagtttatctattctttcttttgaaatagtattgtaatgatataattattttaatcatatttagtacttaagttatttgcaaaattcaaaaagtgaatgaaaagttattggggtctggcggtctgctcaacgtgagctgacttggacttatagttacctccctgaccatctttaatgctttagattgccttgagaagagaaagaatgggtgaagatgctcctttctggcggttttcagcagcttcatatcctgaccttgaagaaatgaacaaaagaactcctcttcaagccaaaaagagaacagagtatcaggaatctgataagcctgctggggtaagtttcatatatttttgtttttgctgaaagttgtattaccttttgattaattataaacattttttgtttgtgaagggagatgtttatccagtagattcatctgatgattattcattcaatcaagttcttgatgcacattggggtgttcttaatgaagaagatgtaagaccttattgtcaattcttaatttccacaaacatcataaaaacatgggaagcatttcaacaattttttgtttaatgtttttagacaagcgggcttcgttcccacactttatcaatcgttgtaaatgactctcctggagttctcaatatcgtaacaggagtttttgctcgcagaggctataatattcaggtatactttttgtggtgttgaatgttgattttacgtttgttttcttattgtaattattttaacaattgccagaaattgaagtctttttggtgtttgtattttttaaatatcagagtctagcagtcggtcatgcagaagtagaggggcgttcccgcatcacaactgttgtccctggtacagatgagtcaattgcaaagttggttcaacaactatacaagttgatagatgtgcatgatgtgagtatatatcaccgttggaaattgcttcatttactcgattcatgttatgttttaactcagatgagtaaagctaaatgaaattaactaaaaaggaaaaggatcgtaagagtctaaagtctcttgaagtgtatttttaattaataaaacctctaaaatcattttattaattccatgatcatatctgacacttttattttttgtgacaatccagtctgcgcaaacaattagctgcattttgctacttgtacccattatgtttagttttttgagatggttcataggtcatttctcagattttgaggttgctccgctgaattcattcaattgagtgaccaacaaacatatttttgtttgttcaggttgtggatttaacattgatgccatttgccgaacgagaattgatgctgattaagattgctgtgaattcaacggcccgacgcaatgttcttgatattgcaagcatatttagggctaaagccgtagatgtgtcagatcatacaattacacttgaggtgaattttattcacttgcagtttattttctgtcaagtgaaaattctaatacttatattttgagtcgtttctagaaaattgctccatttcttcttttggggaaaattccagctagaccaaggacaagtgatgtgctaatctaatcccatgcttgttcacaaaatagaaaccactagtgagactaaccagaagccatcttcatctaaagcccatgcttgttgtttgagtgtttgatgtgaacccaaccttagataaatatggttctgggccaagtctcattactagtgtttaacttacgatcatggggttttacatgatgttagggaggatagttaagattagtggttgtcggccaagcaaaatcatgtggggttatttattttataaaagaaatttagcccaattaaaaatcaaaaaaataaaaataagaaatacatacattcgattatgaactattttagaagtatgatgctcttttttcttccaaaagtaaccaagatagaacatagtttcgaagttcagtggcatggtgtgtggaaagtctacattggaatgcattttgttattgaatatagtatttaaattatatatttttgaataaatatttaagcttttcaaatcgagcttgagccgatctcaaatcctccttgagctgatcttaaatcatccttgagccgaggtcatgcatggctacattaccttttgtttggtttctatacaagaaccaatgcaacacaaaccgcatagcatatacaatatggcacattataaagcttcactgaaacattaaatcaatcactgcatgttctttatgatcccttatttgttttacgtgtattttctaggttactggagatctgaataagatggttgcactgcagaggttgttggaaccttgcggaatttgtgaggtctgtttgtgaatcccttgtctccaatcatatttttattaaacccgacttcattcaaggtttagacttacacccctgctcgacgatcatttgcaggtggcaagaacaggtcgcgtggcactgacccgcgagtcaggcgttgattcctcttaccttcgtggatattcctatcctgtttgatttctatcttttatagcttcttcctgtttcgggtagagattgtcagtaatttgggtgttctttttctatctggtacctagtctaagttgtatgtttttaacaatagatttttgttttttcatccgacttttaagaccctgttttgactctatatgaagttacatacgtaaatacatgctatgtgtggccctttctagaaaaaggtgagttaggcatcgtgggttcgggttaaacatgtcatttattggtacaagtcgcggcgactagctggtgggctgggttgcggcaacccacaaaacacttgtttgtttgattttagtttaccttttttgaacagggaatttattttacttcttagaaggtttgtgttgatagaatagttaattcgatgactagtatggttttgaaaacattgcataaaccttattgagattggcaggaggtaggaattaacttgtaggaattgatagccattatgtgaagtgaggggatggtaaagcaaagctgattattgggtg

SEQ ID NO: 1734 - DNA, 1966 bp, Ambrosia trifida
ggttactggggatcccgggaagatagctgctgttcagaggaatctagctaagtttggaatcaaagaacttacaagaacaggaaaggtaattgtttaacgactgtttgtttacgatgattggttcttgactgaatttgctgctgcttgtatgtagattgcgctaagacgggaaaaaatgggtgaaactgctccgttttggaacttctctgcagcatcttatccagatctagaagccctgggtcctgttgctagtattactaaagtggttgacgagactcctagtacaacgtcaggggtaggttgttaaattttcaggcttccttcgcagcaatcattgttctctaactcggtatatttttatttgaatgaaggggggcgatgtttatcctgtggattcctacgatagctgctacataagggatcgagttctcgatgccaattggggcgtgctatatgacgaagacgtaagtcatcgtctcgttactatgtttacgtttcatttctgacacgcaaattaatgctgcaggcaacgggtcgtcaatctcacactttgaacattcttgtgaataatgctcctggagttctcaacctggtcaccggagttatatccagacggggttataacgttcaggtaaattaacttgttttaagcaatccggtccaggcctagctaactttaacggtaattggttgtttgtttgtttacagagtctggctgtaggtcctgcagaactggaaggtttatctcgcattactactgtgattgccggcacagacgagtctattggcaagttggttcagcagttctacaaattgatagatgttcatgaggtacaaaagtgtccgttatcgttttcactggtatggaaaaattaatgaaatactactcaggtcaaagatatcacctacttaccattttcggaacgcgagttaatgctgatcaaagttgctgcaagccctgctgctagaagggatgtattggacattgccaccatcttccgcgccaagcctgttgatgtttctgaccatactattacgctagaagtaatgtttcttaatccttgtttctttttgtttttcctgtttctgatatcatcttccgtcttctatgttatgttctagctcaccggagacttcaataagctattcgccctgcaaacgttattggagacctatggaatttgcgaggtttgtaacagcataattaattgtttgtttgttggtaacagtgcatggttggttacgttatattgtgtgtgtaggtcgcaaggactggtcgagtggcattggttagagagtcaggagtcgattctacatatctacgtgggttctctatgcctccaacttgattcaagccgatccgatggttgcaagggtccccatccggtgggctacttttatgttgcgacatgtaactgttacagttattagtttttattgtttgttagcttaatatgttgaagacagtttctagtaatcatattggtttcacatcagatcagatgctatatatgctaataacttgcaaagttcagatcgcctgcagaaggtaagcgatgagtatttagaccagaccaacttattatacgatatcaacatattaattaatattgccctatcggcaatacattgcattttcacttatcgaattctcaggtttctggatttctgccccataacacacatgaactctggacaaaaaataataataataataataataattttaacaagttattgccgatttttctagatgctacgttaaatcttcaataaaaaaactaaaggaaaaaaaaaaatcaaaattgcagctattgagttatctaccccagatccctgccaccgtggaccacgcatgggtgatgcgatgttccacgaatgaatcattttatgcccttaacaccacatgatcttagactagacggtgtggttatagggtgaagggggcatgaagcgacatgtgaca

SEQ ID NO: 1735 - DNA, 1865 bp, Ambrosia trifida
gggtcctgttgctagtattactaaagtggttgacgagactcctagtacaacgtcaggggtaggttgttaaattttcaggcttccttcgcagcaatcattgttctctaactcggtatatttttatttgaatgaaggggggcgatgtttatcctgtggattcctacgatagctgctacgtaagggatcgagttctcgatgccaattggggcgtgctatatgacgaagatgtaagtcatcgtctcgttactatgtttacgtttcatttctgacacgcaaattaatgctgcaggcaacgggtcgtcaatctcacactttgaacattcttgtgaataatgctcctggagttctcaacctggtcaccggagttatatccagacggggttataacgttcaggtaaattaacttgttttaagcaatccggtccaggcctagctaactttaacggtaattggttgtttgtttgtttgtttacagagtctggctgtaggtcctgcagaactggaaggtttatctcgcattactactgtgattgccggcacagacgagtctattggcaagttggttcagcagttctacaaattgatagatgttcatgaggtacaaaagtgtccgttatcgttttcactggtatggaaaaattaatgaaatactactcaggtcaaagatatcacctacttgccattttcggaacgcgagttaatgctgatcaaagttgctgcaagccctgctgctagaagggatgtattggacattgccaccatcttccgcgccaagcctgttgatgtttctgaccatactattacgctagaagtaatgtttcttaatccttgtttctttttgtttttcctgtttctgatatcatcttccgtcttctatgttatgttctagctcaccggagacttcaataagctattcgccctgcaaacgttattggagacctatggaatttgcgaggtttgtaacagcataattaattgtttgtttgttggttggtcacagtgcatggttggttacgttatattgtgtgtgtaggtcgcaaggactggtcgagtggcattggttagagagtcaggagtcgattctacatatctacgtgggttctctatgcccttgtgatagacgcacaagtccaacttgattcaagccgatccgatggttgcaagggtccccatccggtgggctacttttatgttgcgacatgtaactgttacagttattagtttttattgtttgttagcttaatatgttgaagacagtttctagtaatcatattggtttcacatcagatcagatgctatatatgctaataacttgcaaagttcagatcgcctgcagaaggtaagcgatgagtatttagaccagaccaacttattatacgatatcaacatattaattaatattgccctatcggcaatacattgcattttcacttatcgaattctcaggtttctggatttctgccccataacacacatgaactctggacaaaaaataataataataataataattttaacaagttattgccgatttttctagatgctacgttaaatcttcaataaaaaaactaaaggaaaaaaaaatcaaaattgcagctattgagttatctaccccagatccctgccaccgtggaccacgcatgggtgatgcgatgttccacgaatgaatcatttcatgcccttcacaccacatgatcttagactagacggtgtggttatagggtgaaggggcatagagcgacatgtgccaaatctctacccaacctgtccaacgccacagatggggatgaatgcaatacgaagagaggtagaaagccaagcactgcacggggcctctctgatgcctacactttcccgggggagag

SEQ ID NO: 1736 - DNA, 1079 bp, Ambrosia trifida
tctttaacaaactgtgtatgttaaaaggactataatgccccagttatatgttgataactaagtgtgtggtatgattaatgagcagggtgaagcgtcacacgatctcggtgtttgttggggatgaaagtggtattataaatcgaattgcgggggtgtttgctagacgaggttataatatcgagtcgcttgcggttggtttgaataaggataaggctttgtttactattgttgtctctgggactgagaaggtgttgcagcaagttgtagagcaacttaacaagcttgttaatgtcttgaaggtctcatcttgtaatttacgctgctatcgtcgttcattaataacgttgttcctaatgcgttactcagttttgtttgatgtaccaggtggaagatctttctcgggatccgcaagtagagcgggaattgatgcttgtgaagcttaatgttgatccaagcacaaaagctgaggtacgtacttatatgatgtttcttgcaatttatcatttaattatgcgttcctgttcaatggtcgggtcaacaaacaagtgtcgcgtgttgtttaaaaatgtagtttgtttaagttgataaatattacttacttttaccttcagattatgtggttagtagacatctttagaggcaatgtggtggatgcatcggaatcctcattgactatagaggtgacttcctcctattcatcaagcttgtgtgtttatacaaattattaagcgattttgatgtttatgtcgtcagtaatagttctcatatggttaatctaggttactggggatcccgggaagatagctgctgttcagaggaatctagctaagtttggaatcaaagaacttacaagaacaggaaaggtaattgtttaacgactgtttgtttacgatgattggttcttgactgaatttgctgctgcttgtatgtagattgcgctaagacgggaaaaaatgggtgaaactgctccgttttggaacttctctgcagcatcttatccagatctagaagccctgggtcctgttgctgccgtttctaaagtggctgacgagactcctagtccaacgtcaggggtaggt

SEQ ID NO: 1737 - DNA, 990 bp, Ambrosia trifida
aaaatttctatgttttatgttgtgatgaatatatggtctataatgtatttatgctttatgttgtggtgaatataatcttgatgtcatgcttttgttattcagggtgaggcgccacacgatttcagtatttgttggtgatgaaagtggaatgataaatcggattgcaggagtttttgcaaggaggggatataatatcgagtcccttgctgttggtttaaacaaggataaggctctttttactatagttgtatcgggaactgaaagagtgttggagcaagttatgaaacaacttctaaagctcgttaatgttttaaaggttggcttttattctgatggttgattcatcatattgtctattttttatactttacttatatcaaccatttttaataggttgaagatatctcaaaggagccacaagtagaacgtgagttgatgctcatcaagataaatgcagatccaagataccgtttggaggtgtttaactaattattttatgatcttcatgttttggttaattacggttatttatattatacctaagtactgcaatgaaccgttcttataattgcaatgaacacatgcaatcaaatattcaaatatagctaaccatttttagcctaaggatatgctatctaaccatgttcttttgtgattctaattttcaggtcaagtggttagtggacatatttagagctagaattgttgatatttcagagcactctataactattgaggtgacgggagtcgaactttttctatagctttatttataattcttcacgcatcatctaggagtgagtttggatcttaatggattgaattgtttatgctattatagggcctttgctaatttgcatatgttcacaaccttatttattagaatttagatataagggttgtatactctgtgactacttggaacaattacaacactaagtaatacaacatatgctaggaaggtgttagaccgttacaatcgacacccaa

SEQ ID NO: 1738 - DNA, 984 bp, Ambrosia trifida
gggtttggtgtttattttttttaaatatcagagtctagcagtcggtcatgcagaagtagaggggcgttcccgcatcacaactgttgtccctggtacagatgagtcaattgcaaagttggttcaacaactatacaagttgatagatgtgcatgatgtgagtatatatcaccgttggaaattgcttcatttactcgattcacgttatgttttaactcagatgagtaaagctaaatgaaattaactaaaaaggaaaaggatcgtaagagtctaaagtctcttgaagtgtatttttaattaataaaacctctaaaatcattttattaattccatgatcatatctgacacttttatttttgtgacaatccagtctgcgcaaacaattagctgcattttgctacttgtacccattatgtttagttttttgagatggttcataggtcatttctcagattttgaggttgctccgctgaattttagctaaacaaacgaaaacaaacatatttttgtttgttcaggttgtggatttaacattgatgccatttgccgaacgagaattgatgctgattaagattgctgtgaattccactgcccgacgcaatgttcttgatattgcaagcatatttagggctaaagccgtagatgtgtcagatcatacaattacacttgaggtgaattttattcacttgcagtttattttctgtcaagtgaaaattctaatgcttatattttgagtcgtttctagaaaattgctccatttcttcttttggggaaaattccagctagaccaaggacaagtgatgtgctaatctaatcccatgcttgttcacaaaatagaaaccactagtgagactaaccagaagccatcttcatctaaagcccatgcttgttgtttgagtgtttgatgtgaacccaaccttagataaatatggttctgggccaagtctcattactagtgtttaacttacgatcatggggttttacatg

SEQ ID NO: 1739 - DNA, 804 bp, Ambrosia trifida
ttaggtggaataacaaatgtgtatagaggttgagaaaacagaataatgtagatatctatatctttaacaaactgtgtatgttaaaaggactataatgccccagttatatgttgataactaagtgtgtggtatgattaatgagcagggtgaagcgtcacacgatctcggtgtttgttggggatgaaagtggtattataaatcgaattgcgggggtgtttgctagacgaggttataatatcgagtcgcttgcggttggtttgaataaggataaggctttgtttactattgttgtctctgggactgagaaggtgttgcagcaagttgtagagcaacttaacaagcttgttaatgtcttgaaggtctcatcttgtaatttacgctgctatcgtcgttcattaataacgttgttcctaatgcgttactcagttttgtttgatgtaccaggtggaagatctttctcgggatccgcaagtagagcgggaattgatgcttgtgaagcttaatgttgatccaagcacaaaagctgaggtacgtacttatatgatgtttcttgcaatttatcatttaattatgcgttcctgttcaatggtcgggtcaacaaacaagtgtcgcgtgttgtttaaaaatgtagtttgtttaagttgataaatattacttacttttaccttcagattatgtggttagtagacatctttagaggcaatgtggtggatgcatcggaatcctcattgactatagaggtgacttcctcctattcatcaagcttgtgtgtttatacaaattaagcgattttgatgtttatgt

SEQ ID NO: 1740 - DNA, 409 bp, Ambrosia trifida
aaattaattttgggttttttacacttctagttttattctttataaaatttctatgttttatgttgtgatgaatatatggtctataatgtatttatgctttatgttgtggtgaatttaatcttgatgtcatgcttttgttattcagggtgaggcgccacacgatttccgtatttgttggtgatgaaagtggaatgataaatcggattgcaggagtttttgcaaggaggggatataatatcgagtcccttgctgttggtttaaacaaggataaggctctttttactatagttgtatcgggaactgaaagagtgttggagcaagttatgaaacaacttctaaagctcgttaatgttttaaaggttggcttttattctgatggttgattcatcatattgtctattttttatac

SEQ ID NO: 1741 - DNA, 1705 bp, Conyza canadensis
tggccattacggccggggctgcagattggaactaccacctaaactgctttctttcactaaatcaagtgttggtcgaaggcttgcttttaagctggttaatgctatctccgactccggtaatggagctccggcttcacttctttctacttcttcccttaatggagttactgccccgccactttcttccaaggtgaagcgccacactatctcggtgttcgtaggagatgaaagtggtattataaaccgaatcgcaggagttttcgctagaagaggttataatatcgagtcacttgctgttggtttaaacaaggacaaggctttgtttactatagttgtttctggaactgaaaaggtcttgcaacaagtggtggagcagctcaacaagcttgtgaacgtcataaaggtggaagacctttccaaggaaccacaggtagaacgggaattgatgcttgtgaagcttaatgtagatccaaccacacgagctgagattatgtggctagtagacgtctttagagccaacgttgtggatgcatcagaaagctcgttgactatagaggttaccggggatcctgggaagattgttgctgttcagagaaatttagccaagttcggaatccaagagctcactagaacaggaaagatcgctctaagacgggaaaaactgggtgaaactgctccattttggaacttctctgcagcatcttacccagatctagaatccgcaactccaattgctacttcttcaagtgttacttgcactgttgatgaggattcgactgcaatgtcagggggtgatgtgtatcctgtggagtacaacaatagctgcataatggatcaagttcttgacgccaattggggggtagtctatgatgaagattcaactggtcggcagtctcatactttaaacattctggtcaatgatactcctggagttctcaacgtggtcagtggagttatatccagaaggggttacaacattcagagtctggccgtaggtccagcagaaatggagggtttatctcgcattacgactgtgattgctggtacagatgaatctatttacaagttggttcagcagttccgcaaattggtggatgttcatgaggtcaaagatatcacccatctaccatttgcagaacgtgagctaatgttaattaaagttgctgctagctctgctgttcgaagggatgtcctagacatcgccaccatctttcgagccaagcctgttgatgtttctgatcacactctcacactagaactcacaggagacttcaacaagttgtttgcattgcaaagattgttagagtcctatggaatttgtgaggtcgcaaggactggtcgagtggcattggtgcgagagtcaggggtcgattctacatatctacgtgggtactcccttccgttataataacaccggaagttatccctcaattgtatgttgcattattgtagctgcaagtgaacacaactgttcagtgtcttttgcactgatggctgcggatgtgagagtatgacttcttgctagaaaaagaaaaaaggaatgtttagtagatcaatttatgttgtattatggtatgccgtgtgatgtcaaaactgtaacagctttcattcatagaagtttcatacttaaaatgtgatgttaagcaaatttataagtaaaaaaaaaagaaaaaaaaacaaaacatgtcggccgcctcggtctcta

SEQ ID NO: 1742 - DNA, 498 bp, Conyza canadensis
tttgggattcgagaagttgcaaggactggaaaaattgctttgagaagagaaaaaatgggcgaggatgctcctttctggcgtttttcagcagcttcatatccagaccttgaagaaatgaacgcaagaactactcttcaggccaaaaaaagtgcagaatttatagaaaccgatatgtctgttgggggagatgtttatccagtagagcaaggagatgactttccatttaatcaagttcttgatgcacactggggtgttcttaacgaagaagatacaagcgggcttcggtcacacactttatcgatggttgtaaatgactctcccggagttttaaatatagtaacaggagtttttgctcgtagaggttacaatattcagagtctagcagttggtcatgcagaagttgaagggcgatcccgcatcacaactgtcgttcccggtacaaatgagtctatcagcaagttggttcaacaactatacaagttgatagatgttcatgat

SEQ ID NO: 1743 - DNA, 8066 bp, Conyza canadensis
aaagtgtaaattaatttagacatgcgttgatttaattacttttgataaattgagagttgtaattggtcaattgagattagttcaattatcttttagtatatagtaagattaagattaagataagataagattaagattttagcatcctgattagaaattatgtataactatgttatctcttctccgaagttaatttacctaattattagtattgttacattacattaccaaagtttgataaattggtaaatataatttggagtaaggattaaggaatgagctaaacactaacgggccactggccaaattattttttcttagcttctatatatggaccaaaaagtttactcattttgggctacttcaaatgagccacatgcaaaaccaaaaaaaaaaaaaaaacttaagaaaataaaaaataaattgagccaaccttatttatgtctttttaaattattatttttttttggttttgattttttatccctctcgcaaaataggtataggtatttgacctaagaattttttagcaaatatatctagaatgaagtcgtcgtggtattgcttttaaatagatatattagatattagaaacattttatcgtgatatcatctttaaatcactactagaaaaatagcctttaatgacaccaaaattatgacacacgcatttacgatgatgcgcaatttttggtgtcataaaaaaactgtcataacttgtaaaatctgaagggttatgacacacaatttttggtgtcataaaaaaatgtagtgtaacgcggaatacacttacatttgcgtatcatcctcaagtgtcgtcttataattttattccccatataaaagcttataattttttatttcaatcagatcgaagcctatacttttttttttcaatcagatccagaaccccaaaaccctataatttttcaatcgaagccccaaaatcgatcgattaatcaatcaattcaataatcacaaattaatggtaacgattattcctttctttacaaattcaacagtatttcattgattcttaaggtttcaatattttgattataggcagcacaagattaaatcgaagaacttgatagtttgtttgattacactcgtagttgtttagaaatcattcccctcgatgacggttcgtatatatacaattaatagtttatagatttgttattatattaatcaattgaaaataactaaggtttcgttattatatttattttccattaattagtaaaaattcagtgcgatgaatttttgaaatatgcgattagatctgagtttgcttttttctagacaagcaggcttcgacacacacactttatcgatggttataaatgactctcctggagttttaaatatagtaacaagagtttttgctcgtagaggttacaatattcaggtatgttttttttgtatctgggatatttcattaatttgcttcttgaacatatggaattaccagagttttaagtagtttggtgtttgcatctttgattcagagtctgtcagttggtcatgcagaagttgaagggcgatcccgcatcaaaactgtcgttccgggtacaaatgagtcaaccaacaagttggttcaacaaatatacaagttctatcgccattgacctgttggagatccataagaaagagatggatctaatttcttcaaatataagattgggagagaaaggagcattttcatggaccactttattatatgtttcttccacaagcaccatattgtaatttgaacgattgcatttatcattttcttccatttttttgtcaccaagtaatgtgttatgtaaaagatgcaggtctcgtacctgaaaggcatatatcggacttattttacaccatcttccaaccttgctccaaacatctaaaactaatgggcagccggtaaacaagtggtcacttgattcttcattcacattgcaaaacgggcatagtaacgtggttggagaaataccacgttttgacagctgtaagagtgttggtaagcgatctaatcctgcccgccagttcatgatattcaccttttttttggatccatttgttccaacaaaagtcaacacccgagacattattatctacggcgtcaagtttctcccttacctcaaccactatatatgaatcagattcaaatgttgcaagtatgtccacccctagtttatcaaaatcctgcttaagtttgtgtacatttctccaaagacctccgattctatttttgagtggaacatcgagcacgttacctgcttcaccatgaatagcaaccatcgtctttctccataacctatctggttcaacatgaaaacgaaaccaccaacgtgctagcaaagccatatttgcaacctttaaagaaccaataccaaggccacccctatccttctgtctaacgacctcattccatgcaacccaactaatttttttatgctcttcattttgagcccagaaaaaccttctccacagcctctccaattgatcatttattttcataggagctcaaaacaatgaaaaatagtgtatggtagacttgagagaacagattgaattaacgtgactcttcctcccaccgataaatttttggccttccaagaggataatcttttattaaaaacatcaactactggttgccaatgacaacatcgattcatactaacccctagaggaaagaccagatactccaatggaaaagacccttgcttgaaatgaaaatgctcagctacttgtgctactgattcagtttgagtcccaatcccgatgattgttgatttattaacattcatttttaacccagaaataatgtagaaacctctgatgattctgactaatttcaaaaagtttgagatagaccaggagcccaatagaagtacatcatcggcatataataggtgactaataatagggccttcattggcaactaaatcccgttgatcaggttttttgagatttcatcattcagaaaacaagtcaaaggttccatggctaaagtaaacattactgatggtttgacaagtcaccaccctccaaggtccagttcttataacttgcgtaattctcttaatagtttgacaatatgttatattgtgaaattctcttaatagtttaactaataggagacgtaaatatcatattacaccaccattttgtagctcttgagcttgttcctagttcactttccagctcttcaggttgcttttgtaattcatttgactgatggttgttcttctagttaggtgatagataggacccaaaatagggtataagaattgccaaaggattataaataaagatttcacctgatatgtttataatttacagtgattgtattatgtttgtactaattatgatgtcttgggctgaaatagataggacataggcgtcgggagttgcaaagggtaaaccgaggattgcagggaggaaaacccttgctgatattaacaatattccacagagaggtactgcttcaggtgaagttaacaagtcacagccaagttcagacgctgcaagacatattatcgagcgacttcaaaaggtacatctttttggttggtcatcttaaagctaaaacatgtcacagttttgttaacatgattcaagtaaatatcatttttttgatacataatatagatagatagatatgttgattcagtaattgaagttgctcatgtatgttatccagaaaaatgcaggatttctgaagcttttgatggataaaaagtatccattgattttcttttacatttcatgttgctatgagaatctgaaaactttaatttggccttataagttaactaatgcttttgcagtaaactaattgaattaagtggagtcgaggtgtaaaaagtgagggccactttgcagatagtgaaacaaccgaatttgcaacttgctcagtcaaacagccagatttaagcagttagtttacttggcgtagttaatgattgatatactattgaggcattcatttgaatatgactagtatgtgataatgtttcattttatgctgcaggaactaaatttagtcagggaaatggtaagtagtccggaagatgctaggcgttttgtcgtcctctttgacatctaagttcttccattggtcatattcataccccatggttttcttgttttatccagcaaaattctttaaagcatgagcttggttgcaaaagcgccttgattattgcaaaaaatctcgagctggaggttagtttagtgtaatcttcttcatcggtagcacacttgcatgccccttggtgtatttctctttatttaatgcttgctgtttgagtaagcctggcaaaatgggagggtcgggcgagtttgggtaacgggtcaaagcgggtgcgggtccaaacgggtcatttcataaatgcgtgtcaaacgggtgcgggtcgggtgcgtgtcaacccgcatttttggtttttttttaatggtattttaacatgtttataataaagttacaactgcttaagcttttcctatcaatctaccatttttttagctgttaactcgtgacttgtgtgttgacttgttttgtgaatttttgatcgcgacttgtatcgtaagagttataaaatgaaaattacatgacaaaattatataatgtgtaaaaacatacataaattgatatttttaacaaaaatatatgatgcatgtgtaaaaattacatggaaaaaatattacttagatttatttttaaatttaatatatattggatcaaagaaatgaaagaatgcatcaatgaaaaaatgacaaaaataaataataataataattatattgataataataattattataataatatatatttaagtgaatctgattaaaagttcttttcgttgatgtgagaattgaaaataattaattaaataaggggtgaaataataattcatcttagttaatagattgaacatccattaacaagttgagtttactccaaattgaaggtgggtaggtcgtaggtgtactagcgtacactctaacggcagtatgtacgacattaacataaatatatgagtgatcactcaaacttttgaagacctgctcgacccgcaaagctatattgataatttaagagttaaaaatgagacccgcttctatcctttttgtaagatccagttgtacccaataaacaaaataaattacccaaacctaatctaatgaaattgggtatggattgccagggctatgtttgagtgtatgttatctcagggaaaagcgaaaaccaagatatgtcaaataaatgaaaatattgtaagtacataaacctcaatagtattttagttttgttcaaaatttgttggttcaagttttgtctgctacaatataagatgaaaatttatgtttctatcttgtagacaggtaatgtaactgagccagaggcgaaaaaagtgatccaagtagcagaaagtgacaatgacagaagtagaacgcaaaaatctaaatgtcagaaatctaaaacatgtgaatgatgatttggatgaaatttgtgaagaatggacaaaatatgtgacaaacttcattttccggtcttgaattcaatataacagtggttgtatggatgtgatgaatttttatggttagttttagaatttttaaataacttgtggttgtatgaaatacattgtttagatatatataaaatgcgtttttttgctatttgtgtatttatttgtattatgagattaactgttatttaatgtgtagagatattaataattttataaaaatatttttttttataaaaaatttgaactatgacacgcaaaaaaggcgacataaattagtgtcattaaagtgtgtcgtaaaagagtgtcataaaagcgtgtcataaatttatgacgtgccaaatgcgtgtcataaagatttatgacgggtcgatttatgacaccaaaaatcgtgtcatctgaccccttttatgacaccaaatcggtgtcgttaaaggtgttttttttctagtatcacttttaaatagatatattagatattagaaacattttatcgtgatattgtctttaaataatttaatgacatgataaacttttgatcaaacatatttatgatagagtgatcttcatctttcttttgaattcaccagtcattcgatgggtttcaaggggatcctcgacttttccacctttttttatcctaaatgtttgtctactcaagaacaaatcaaagaccaactatctatatcgggagtagcaatcctctataggaaaggccttaccgtttgcataccctaaagtcgtcgttacgcaccagtagtcgatctgagtgttatcgtctactctagaaggtaatcgaccaaatatatttctttatgaagaaaacatttacgacaatcaagtcgttagtcgtatgcagtaacaaactccaatagtgtgcgttttgttttcattttcctctcttaaccatatcttaagttaaagaaaaattattaatcttcttaaagcttttccgaaaatctctaaaatttgacatgtagatttcattaattttattacttaatctcattttcagattatattattatcataatcttatctctactacctaataaaataaatcacaccccccacaataaatgttttctgcctttaaaattacttatttacccttggacttaccttttttatttttttcttttaatatttaatattaatacaaaaaactgatttcgacaaataaagtggtcacccatgtttctttagtatctacggtttaagattaatgttggtggatcaattatttttattaaagttacaattttcaattttaataattaagatgtcctttatctttcatttggtaagattaatggataaggaaaagttttatttataaaacatctgggcataaaatattctagaccgccttccccaccactgtcgccgcattcagggacggttttagcatgggggcattgggggcaaatgcccccattctaattttggtacaatgtaattttttttatataaattctaaaaaacttagtctaaaccgagattacatataaatgtttctttctttgtcataagtctcttttttggatgtatatatatagtattaccttgtcaaactcgacaataatactgtgtatttagttccccgtcttcatcatgatcatcatcttcttcatttcaaaggctcattttcgaagtatttagatgtagagagtgatgaagtgtaaggggtttgtgtttatgattcagagtgtttgaatgtaaaatttcaaagattttgatggtgatggtggttgttgcggtggtggatctcgtggtggttgttgtggttgtttcacatgttgtgaagggaggtatatttgattgttgaatttacagataaactgataaagtgagattgtatatggaagactaaaatcattactcgtatttactaatttaccatctatctagacttgtctttatcaaatggtgaagtgtatattggaaaattccatcaatattttattagttacaccacctacacacattttatagattcaaatattattgtaatttttttaatgtaatattccgtatatttatatatataagtttgatttgatttgtgaaaaattaatgtaggtaagagtacaatatttgaaataaaattgtctacgcgtgaaacaaaattcttttagggtccattttctatcctcgagacgggttttaaaaaatttttattttatctttttagaaacggttttaagaaatataataaagactcttaaatttgccccttcttggaaaaaactctggctccgtcactgactgcattgcgcgggtaccatactcgtaattaaagatgatttttaggttgatttgttagctgtttttttaagttaatatacttatagctttagtttcgtcgtagcgaaaatgtgttgcttgttccacccaaagctatttgcaagtggctggctcatgtatgtgtttcggtatgtgggtgtatttttgataatactgaaatggtacctcacgtttgtgccatattactggttttatacattttcgtttgaaattacgctgatcatacccaacgtatgc

SEQ ID NO: 1744 - DNA, 7484 bp, Conyza canadensis
tttgcacaatgtagcagtggtggtggtaatgatagcggcagtagggacaatgatggaagcgacggtggtggtaaatgtaaaagtatttgatgttaaatgtggtattatagttattttaagtgttggaggatctataccttaaattattacattaaggatattataggagtatattagatcgagatgtttaaattagtaaataaagaagaaaaatatttttgattttttaaatgtagaaagtttaaggaaaaagaatttattttattagataatatagattataactagttgaatcgttttataaaacccgactgctttgattaaaatatcattggttataacttttaaacataggcctcgtgtcacaatccagcttaaagtaaattttgacaaccttaaatcaaaagctcctcaatatataatataaccaaaaaaactcaacaaataaataaatagattaatatatatacctcaacaatggcagccgccgccgtgactacttactctgccaccgcatttcgtactcgaacaccaccaccaccaccaccaccgtctgtcatccccaatcaactatcatatgcctccaaaaaacccaacagcaaatttgacctcaaaaaactctctgtcaaagcctccaccactggctctgttcccgcccctgttgactcaccttcatccaattcgtctagacccacgtcagccccacctccactccccctttttttattattattaattgtttagattcatttttgctaatcatatatatatatagatttctagtcatatatctatgtttagtcttgttattttatgctgcatttcgatggggacaatggtaaaaacaatatttacattggtaatgtgtgtgtatagttgtaaaatttgcatgtttgttttgtttgtgttttcagtcattatgcaacttagtattcttaaatttatgtttttttcttttcaaatgagattttgttacggattgatcagtgtagatgagtgaagtgttagcctaagggaatagggatagggaatctcgatgtatcggttgcaatagttattcttctagtgacccacaaaataatttgaagaatgtttgtctagtggggcgtatggggttaccttgctatcgaggtctagggtgagaatcaaactataagtatagaaggttaagatagagcttaagccttaaggtgtgagtgagtgaagaataaagcatattttgaagatgatggtgatctttggttgaattgttggatatgtagtcataactagtggggttgctgcctgagcctgcatcgtgtgtcggctactagtatggattctgggacgactacggattgggccccagatacacagtattccctttgtcaggattacacttggagcacaatgcatagtctaggttaatgatgacagagttgccacctactcttgaaatctatagtacacttcaagttgacgttatatcagagagctacttagggtgttctatgttatttaacctctcttgttgatattctctggggtgttttttgggtatttgattgctcttggatttcgttgattcccttttaagtgatcctggcttttgatttcccctatgaggtcgttgatacccactgaagcttttttggttattgtcccatattaagtttttttgggggcttattggtggtttgatatttgatcacatggtattgtattttttttcttcaaatattgaagttatgagtgttgtttctaccatgtgataaatatctaagtctatgcttagtaactacatttgatacttaagttagaactggatattgaacttttactaaccgatatggttaactaaacaccataggcattgatatctgatgccatttaattgcgtgtagttatttaaattatttgctttccttatttatactttgtcatttgccttcatatattcttatgaaaggtttacatattaatttctcgatatatctttataaataaagtttaatgtaacacagggtgaggcgccacactatttcagtatttgttggtgatgagagtggaatgataaatcggattgcaggagttttcgcaaggaggggatataatatcgagtctcttgctgttggtttaaacaaggacaaagctcttttcactatagttgtatctggaaccgaaagggtgttgcagcaagttatgaaacagcttctaaagcttgttaatgttttgaaggttgacttctgtttcaagtttaaaccatcgatccattatggttattttcttttttaagtttctcgaagttgactaccatgaacaggtcgaagatatctcaaaggagccacaagtagaacgtgagttgatgcttatcaagatcaatgcagatccaagttaccgtatggaggtaattatgcaatgttaatcatgtttgggtttttggctgttattcataacatactacattattctgattcatggagacgaacatatttccatgacgggggtgttttagatatgccatttaaattgttcatatgattagtgtgacctttagtactgataacataagtgtttggataaacagattttgcttatgactgtattatgattatctagtggacaagtaaaatgtgtgagaatatgttatctcaccatattcttatggttttgattttcaggttaagtggttagtggacatctttagagctagaatcgttgatatctcacaggactcgctaacaatcgaggtgatggaagttgaaattttactttaacctttaaagtgtttactgttttttcaggcacaactgatctggactcagttttgggtctttatgtattgtaatttacaaaagtataatgctctatagaggacctgtgttagtttgtaatttttcaatgacctttttgataaatatgaaattcgtacacactttgactctttggaatttaggtaactggtgacccagggaaaatggttgcagtgcaaagaaacctgagtaaatttgggattcgagaagttgcaaggactggaaaagtaagttattattaagtctctattttttcctattcttctttcatattgattgttaaattctgtatgccttagattgctttgagaagagaaaaaatgggcgaggatgctcctttctggcgtttttcagcagcttcatatccagaccttgaagaaatgaacgcaagaactactcttcaggccaaaaaaagtgcagaatttatagaaaccgatatgtctgttggggtaagttgctttctctttttgactgacgctaacctgggttgtagaggttgcaaattagttgggaaattgggtcaaagcggaatttttttttgcggatcggctaatgttgacctgaattggtgtttgtcccaagttcagtttgatcttttatacataattagtttgtaaaacataactaaactttttatatatgtaaatgcaactatacggcattgcttttcaacaaaatgatataggaggcaccattgaaaagaaagattttagtggttttatgcttaaaactacatttggcaactttcagccgaagctctttgtttttaaacttatttgctttactcgtttgacccgttataatataaattagtctggttcgacgattatctatcttgcacgatgtagtttagacttgaatacttcatacacagatggtgaatgaggtggtatttcttatctgtattaaattatatttgtgaagggagatgtttatccagtagagcaaggagatgactttccatttaatcaagttcttgatgcacactggggtgttcttaacgaagaagatgtaagaacttgatatcacttctcatatttcacaaatgtcactgaggtgcattgaagtatcagtaatttttagtttgatgtttctagacaagcgggcttcggtcacacactttatcgatggttgtaaatgactctcccggagttttaaatatagtaacaggagtttttgctcgtagaggttacaatattcaggtatgttttttgtattccggatatttcattaatttgcttcctgaacatatggaagtaccagaggttcaagtagtttggtgtttgcatttttgattcagagtctagcagttggtcatgcagaagttgaagggcgatcccgcatcacaactgtcgttcccggtacaaatgagtctatcagcaagttggttcaacaactatacaagttgatagatgttcatgatgtgagtatatattgtagttggaaaatgcttcatatgttaagtttattatgaatgagcagtactactagtctcattttccgccctccaaggtccatttgtagttgtttacgacccagttcttatggaaaggtagatttgggctgtgctggtaaaattgaaaggtttaactaataaggaaatgggtcaagtggttcgaacaggttgaaagtttcccagagagtgatactcgtataattattgtaattctcttgatcgcttttatcaccagtctgtaaaaaacgaaaaagtttgacaagatgtgtttcacttcaaataggttatagaaaaatagatttattaaaataatgtaatttttgttattttatttgacccaaaaggactttgaatagtaccaaaaggactcttcattgacccagtacccacctgtctgttttgtcacccctacccatttggttgctattgatactactgaggagatataattattctattacaccaccattttgtagctcttgatctggtttctagttcacattccagctcttgaggctgcttttctaattcatttgactgatacttgtttttctgtttaggtgatagacctaacatccgtgccatttgctgagcgagagttaatgctgattaaagttgccgtcaattccacagctcgacgcagtgttcttgatattgcaagcatatttagagctaaagccgtagatgtatcagatcacacaattacactcgaggtgaaatttaaatataattcacttgcatattacacgtgttgactgaaatttcatgatcctactattgaacgttacaaaatttcatgatccttacctttattttcacagtttttctgtttttctttccccgttgggttgtttcagcaataaattgtttttcttgtattttccaggtcactggagatgtaaataagatggtagcattacagagactgttagagccatgtggaatttgcgaggtttgtttgtgaaatctgttatttataatatttctatttgaacatgtcaccttccagtttaaaacccacagcttggtttgctcatttggaaccatgaacaatctcattgttcgtgaccaaactacagttctagaactgaactagagtggtcagtctttttgtgttgcagtcctatttacttaatccttgatcattatttgtaggttgcaagaacagggagggtggcactgtctcgtgagtctggtgttgattcatcttaccttcgtggctattcctatcccgtttgattcagtcatttagagtgtctttttgtttttggttgctcggagtatagaattatatattttcaatgattgaatatctacaagtcgttttagcatgtatgttttaataaaagctgctgttttgaatgagggtttggtatgaacccaatttgaaagattttgttttttctttaaataggcgcctaagctcaacaagggcacatggttagattggttgaactagttttttagggaaacatgttcctcatcaagttctaatttgcaagattgaccgaacccatgtccctgccattttttccgttcatgtcttgagccgaagttataactcaggtttaagcacaccctcattaaaactcttctaataaattgaatggaatttttagtcctcaaatatcctcgcgagattttagctcgtgatttatgctgcccacagagaatatgtggtttttgatgaccctatttttcagttaatttccaaacatcatccaccaattccactctttttgggagtcaaaatttattgacaaaattagaaagagagaaacaaccaaaaatcatagaggaattaaaaataaaaatatgaaaaaagatgatctaacatgagaatggacatcgaacatggaatataatgttaacaaatatccacaaagactgaattaatcagagaatgtggcttcagaaaagcggaagtagtttgcagggtggtgatcgaatgcagaggaagggaactggaaccgccatggttgcggtggctatagacaaggacaaatacagccagcaagcgcttaaatggtccattgaacatcttcttacccgtggacaaaccgttgtcctcattcatgtcatccggaaaacccctcctacaggcaatatttgtattctgtcaaacgattcagatattaacattgtttataacaactaattgaaacagagagagagagagagagagagagagagagagaaccttataatcccatatcaatttcaactatttgaccaatatataacccctaacacgattgttgagtcacataatccttgaaacaagataaaacaattagactgcgttaagttacagaaaacgttttctaattttccacttagaattcataagaaaatggaaggggttttttagttctagaaacttaaacttctgaaaatgcgtttagttgtaagtggaaaacgtaaggagtttttcatttttaaataacagatgtgccaatatgaatgtagggggagggattgatgcatctgctgcaaacaagcaacaaactgagaagcaaacaagagatttgttcctcacgttccattgcttctgtacgcgtaaagaagtacgtgttttactactatctgtcttgttgggtatcttttgcatggttttgctaaaattgttgcactgcagatacagtgttacgatgttatacttgaagatgcaaatatagcaaaagcactcacggaatatgcatcttatgctgccatagaatatttggtccttggtgcctcatcacggcatggtttcatcaggtcatttattcaaatgaaatttttgcaaaacctttaaatgttttaacgattatcacctttgagttaatattgtaagcatttctataatgatagctgaatgcttggactaatgagtaacgattaaaacatttataaacagatttcggagttctgatgtgccaagccaagtaatgaaatcgataccagatttctgcactgtttatgtcatctcaaaaggaaagatatcctcagcaaagaaatcttcacgaacagtcccgtttccatctcctatacgtgagaaaatagaagaacaatctaacaccaactttgaagcaagtgtacgccgcaagaatagttttaacattaaaagtcagtcatttattttcagtttaaatacaatacattcccaaaagttatcttgtttttcatgactcaaagaacttgtgaacagaaccagaaatcgcgccagagaagccactacttccggcaccagaaga

SEQ ID NO: 1745 - DNA, 7382 bp, Conyza canadensis
ctataccttaaattattacattaagggtattataggagtatattagatcgagatgtttaaattagtaaataaagaagaaaaatatttttgattttttaaatgtagaaagtttaaggaaaaagaatttattttattagataatatagattataactagttgaatcgttttataaaacccgactgctttgattaaaatatcattggttataacttttaaacataggcctcgtgtcacaatccagcttaaagtaaattttgacaaccttaaatcaaaagctcctcaatatataatataaccaaaaaaactcaacaaataaataaatagattaatatatatacctcaacaatggcagccgccgccgtgactacttactctgccaccgcatttcgtactcgaacaccaccaccaccaccaccgtctgcatccccaatcaactatcatatgcctcaaatggcataccttgtaccttcaccaccatttcttcaaaacccaacagcaaatttgacctcaaaaaactctctgtcaaagcctccaccactggctctgttcccgcccctgttgactcaccttcatccaattcgtctagacccacgtcagccccacctccactccccctttttttattattattaattgtttagattcatttttgctaatcatatatatatatagatttctagtcatatatctatgtttagtcttgttattttatgctgcatttcgatggggacaatggtaaaaacaatatttacattggtaatgtgtgtgtatagttgtaacatttgcatgtttgttttgtttgtgttttcagtcattatgcaacttagtattcttaaatttatgtttttttcttttcaaatgaggttttgttacggattgatcagtgtagatgagtgaagtgttagcctaagggaatagggatagggaatctcgatgtatcggttgcaatagttattcttctagtgacccacaaaataatttgaagaatgtttgtctagtggggcgtatggggttaccttgctatcgaggtctagggtgagaatcaaactataagtatagaaggttaagatagagcttaagccttaaggtgtgagtgagtgaagaataaagcatattttgaagatgatggtgatctttggttgaattgttggatatgtagtcataactagtggggttgctgcctgagcctgcatcgtgtgtcggctactagtatggattctgggacgactacggattgggccccagatacacagtattccctttgtcaggattacacttggagcacaatgcatagtctaggttaatgatgacagagttgccacctactcttgaaatctatagtacacttcaagttgacgttatatcagagagctacttagggtgttctatgttatttaacctctcttgttgatattctctggggtgttttttgggtatttgattgctcttggatttcgttgattcccttttaagtgatcctggcttttgatttcccctatgaggtcgttgatacccactgaagcttttttggttattgtcccatattaagtttttttgggggcttattggtggtttgatatttgatcacatggtattgtattttttttcttcaaatattgaagttatgagtgttgtttctaccatgtgataaatatctaagtctatgcttagtaactacatttgatacttaagttagaactggatattgaacttttactaaccgatatggttaactaaacaccataggcattgatatctgatgccatttaattgcgtgtagttatttaaattatttgctttccttatttatactttgtcatttgccttcatatattcttatgaaaggtttacatattaatttctcgatatatctttataaataaagtttaatgtaacacagggtgaggcgccacactatttcagtatttgttggtgatgagagtggaatgataaatcggattgcaggagttttcgcaaggaggggatataatatcgagtctcttgctgttggtttaaacaaggacaaagctcttttcactatagttgtatctggaaccgaaagggtgttgcagcaagttatgaaacagcttctaaagcttgttaatgttttgaaggttgacttctgtttcaagtttaaaccatcgatccattatggttattttcttttttaagtttctcgaagttgactaccatgaacaggtcgaagatatctcaaaggagccacaagtagaacgtgagttgatgcttatcaagatcaatgcagatccaagttaccgtatggaggtaattatgcaatgttaatcatgtttgggtttttggctgttattcataacatactacattattctgattcatggagacgaacatatttccatgacgggggtgttttagatatgccatttaaattgttcatatgattagtgtgacctttagtactgataacataagtgtttggataaacagattttgcttatgactgtattatgattatctagtggacaagtaaaatgtgtgagaatatgttatctcaccatattcttatggttttgattttcaggttaagtggttagtggacatctttagagctagaatcgttgatatctcacaggactcgctaacaatcgaggtgatggaagttgaaattttactttaacctttaaagtgtttactgttttttcaggcacaactgatctggactcagttttgggtctttatgtattgtaatttacaaaagtataatgctctatagaggacctgtgttagtttgtaatttttcaatgacctttttgataaatatgaaattcgtacacactttgactctttggaatttaggtaactggtgacccagggaaaatggttgcagtgcaaagaaacctgagtaaatttgggattcgagaagttgcaaggactggaaaagtaagttattattaagtctctattttttcctattcttctttcatattgattgttaaattctgtatgccttagattgctttgagaagagaaaaaatgggcgaggatgctcctttctggcgtttttcagcagcttcatatccagaccttgaagaaatgaacgcaagaactactcttcaggccaaaaaaagtgcagaatttatagaaaccgatatgtctgttggggtaagttgctttctctttttgactgacgctaacctgggttgtagaggttgcaaattagttgggaaattgggtcaaagcggaatttttttttgcggatcggctaatgttgacctgaattggtgtttgtcccaagttcagtttgatcttttatacataattagtttgtaaaacataactaaactttttatatatgtaaatgcaactatacggcattgcttttcaacaaaatgatgtaggaggcaccattgaaaagaaagattttagtggttttatgcttaaaactacatttggcaactttcagccgaagctctttgtttttaaacttatttgctttactcgtttgacccgttataatataaattagtctggttcgacgattatctatcttgcacgatgtagtttagacttgaatacttcatacacagatggtgaatgaggtggtatttcttatctgtattaaattatatttgtgaagggagatgtttatccagtagagcaaggagatgactttccatttaatcaagttcttgatgcacactggggtgttcttaacgaagaagatgtaagaacttgatatcacttctcatatttcacaaatgtcactgaggtgcattgaagtatcagtaatttttagtttgatgtttctagacaagcgggcttcggtcacacactttatcgatggttgtaaatgactctcccggagttttaaatatagtaacaggagtttttgctcgtagaggttacaatattcaggtatgttttttgtattccggatatttcattaatttgcttcctgaacatatggaagtaccagaggttcaagtagtttggtgtttgcatttttgattcagagtctagcagttggtcatgcagaagttgaagggcgatcccgcatcacaactgtcgttcccggtacaaatgagtctatcagcaagttggttcaacaactatacaagttgatagatgttcatgatgtgagtatatattgtagttggaaaatgcttcatatgttaagtttattatgaatgagcagtactactagtctcattttccgccctccaaggtccatttgtagttgtttacgacccagttcttatggaaaggtagatatgggctgtgctggtaaaattgaaaggtttaactaataaggaaacaggtcaagtggttcgaacaggttgaaagtttcccagagagtgatactcgtataattattgtaattctcttgatcgcttttatcaccagtctgtaaaaaacgaaaaagtttgacaagatgtgtttcacttcaaataggttatagaaaaatagatttattaaaataatgtaatttttgttattttatttgacccaaaaggactttgaatagtaccaaaaggactcttcattgacccagtacccacctgtctgttttgtcacccctacccatttggttgctattgatactactgaggagatataattattctattacaccaccattttgtagctcttgatctggtttctagttcacattccagctcttgaggctgcttttctaattcatttgactgatacttgtttttctgtttaggtgatagacctaacatccgtgccatttgctgagcgagagttaatgctgattaaagttgccgtcaattccacagctcgacgcagtgttcttgatattgcaagcatatttagagctaaagccgtagatgtatcagatcacacaattacactcgaggtgaaatttaaatataattcacttgcatattacacgtgttgactgaaatttcatgatcctactattgaacgttacaaaatttcatgatccttacctttattttcacagtttttctgtttttctttccccgttgggttgtttcagcaataaattgtttttcttgtattttccaggtcactggagatgtaaataagatggtagcattacagagactgttagagccatgtggaatttgcgaggtttgtttgtgaaatctgttatttataatatttctatttgaacatgtcaccttccagtttaaaacccacagcttggtttgctcatttggaaccatgaacaatctcattgttcgtgaccaaactacagttctagatctgaactagagtggtcagtctttttgtgttgcagtcctatttacttaatccttgatcattatttgtaggttgcaagaacagggagggtggcactgtctcgtgagtctggtgttgattcatcttaccttcgtggctattcctatcccgtttgattcagtcatttagagtgtctttttgtttttggttgctcggagtatagaattatatattttcaatgattgaatatctacaagtcgttttagcatgtatgttttaatcaaagctgctgttttgaatgagggtttggtatgaacccaatttgaaagattttgttttttctttaaataggcgcctaagctcaacaagggcacatggttagattggttgaactagttttttagggaaacatgttcctcatcaagttctaatttgcaagattgaccgaacccatgtccctgccattttttccgttcatgtcttgagccgaagttataactcaggtttaagcacaccctcattaaaactcttctaataaattgaatggaatttttagtcctcaaatatcctcgcgagattttagctcgtgatttatgctgcccacagagaatatgtggtttttgatgaccctatttttcagttaatttccaaacatcatccaccaattccactctttttgggagtcaaaatttattgacaaaattagaaagagagaaacaaccaaaaatcatagaggaattaaaaataaaaatatgaaaaaagatgatctaacatgagaatggacatcgaacatggaatataatgttaacaaatatccacaaagactgaattaatcagagaatgtggcttcagaaaagcggaagtagtttgcagggtggtgatcgaatgcagaggaagggaactggaaccgccatggttgcggtggctatagacaaggacaaatacagccagcaagcgcttaaatggtccattgaacatcttcttacccgtggacaaaccgttgtcctcattcatgtcatccggaaaacccctcctacaggcaatatttgtattctgtcaaacgattcagatattaacattgtttataacaactaattgaaaaaaagagagagagagagagaaccttataatcccatatcaatttcaactatttgaccaatatataacccctaacacgattgttgagtcacataatccttgaaacaagataaaacaattagactgcgttaagttacagaaaacgttttctaattttccacttagaattcataagaaaatggaaggggttttttagttctagaaacttaaacttctgaaaatgcgtttagttgtaagtggaaaacgtaaggagtttttcatttttaaataacagatgtgccaatatgaatgtagggggagggattgatgcatctgctgcaaacaagcaacaaactgagaagcaaacaagagatttgttcctcacgttccattgcttctgtacgcgtaaagaagtacgtgttttactactatctgtcttgttgggtatcttttgcatggttttgctaaaattgttgcactgcagatacagtgttacgatgttatacttgaagatgcaaatatagcaaaagcactcacggaatatgcatcttatgctgccatagaatatttggtccttggtgcctcatcacggcatggtttcatcaggtcatttattcaaatgaaatttttgcaaaacctttaaatgttttaacgattatcacctttgagttaatattgtaagcatttctataatgatagctgaatgcttggactaatgagtaacgattaaaacatttataaacagatttcggagttctgatgtgccaagccaagtaatgaaatcgataccagatttctgcactgtttatgtcatctcaaaaggaaagatatcctcagcaaagaaatcttcacgaacagtcccgtttccatctcctatacgtgagaaaatagaagaacaatctaacaccaactttgaagcaagtgtacgccgcaagaatagttttaacattaaaagtcagtcatttattttcagtttaaatacaatacattcccaaaagttatcttgtttttcatgactcaaagaacttgtgaacagaaccagaaatcgcgccagagaagccactacttccggcaccagaagaccctgaatcaatta

SEQ ID NO: 1746 - DNA, 6631 bp, Conyza canadensis
ttccatatttggcatgatttggattttgaaaggataagttataaatttatcaatatatccttcaaacttttatatgaactataataactatggggctataaatgtaatattatgtatttttatcctttcttattcttctcttttaactcaagaatgcctttaaatccttttattcactttcttttcttttaaatgataaaactcaagaatgcaatttataaatataattttatatcctttcttctcctattcaatcttctcttttattctcctttaataaaactcgaaaatacagtgttagggtattgccaaaagtcaaaccggcagagtgcatatatattggaggtgttagccatttttatttataaaaaaaaaaaaaatctgtacgggcgtgagtgcatatatatatatattgcggtttggaaaaaaaaaaagaaaaacctttaaacaaaaaaatatgattgagcacgttgacataaaaatgtaatgtgtaccgaccacggtcaatatgtccttaccacccgccgcctccacctttaagagagagagagagagagagagagaatcattatcaacatcatataataacaccggaaaagcaaagcaacaaaaatgagtgtcacagccacattgcagtctgtctctactccggcgtcaccactaagccagggctgcagattggaactaccacctaaactgctttctttcactaaatcaagtgttggtcgaaggcttgcttttaagctggttaatgctatctccgactccggtaatggagctccggcttcacttctttctacttcttcccttaatggagttactgccccgccactttcttccaagtataactcttctcttttctttaattccttcttaaattactagtaactataataatatttgtttttatagaacctttcatgtttttctttacccaagcagcttataattaataactttttgcaaaagcttaattaaaaagcatttgtcatataatagctagaaggaaggcaggattagctttcaagcagtcttcaagcatgacatgaattcaagacagtctgcttctgagaatctgattctactttcatgccacctttcacttccccgtggcaatgcctttgattctggctttagattagggtcttgcttacaatgttgttatttaaattgtacatttttgtcagtaattttagtgtaaccgaggtatttagctcaactttttttggggttaattgtttcaactactcgtaaccgaattttgattgttgtttaagattctcttgcaacaaagttctcaactttaagcctatagtatgaacatatttccttggagttatcccagagagatattcgagatacctaggcacatacgggtcaataagttatttagggaaaatgattacagtatttggaggaatacccgttgcaccgaaactcttccaacatgtgccagtacatttgtaaagttactgcaacttagtaaactctatgggtaatacaaccatgtgtttacaggtaggagtatctttttgataaaatttatttggtttatgtattgaccagggtgaagcgccacactatctcggtgttcgtaggagatgaaagtggtattataaaccgaatcgcaggagttttcgctagaagaggttataatatcgagtcacttgctgttggtttaaacaaggacaaggctttgtttactatagttgtttctggaactgaaaaggtcttgcaacaagtggtggagcagctcaacaagcttgtgaacgtcataaaggtttgtatgaccatcaaatgtgaatcttgggtgctctttgaactttatacatgattaacgagtttgatgtatcaggtggaagacctttccaaggaaccacaggtagaacgggaattgatgcttgtgaagcttaatgtagatccaaccacacgagctgaggttttagtgttttgcatacttctatgatattcaattatagaaaatggcagagagaatattttatttgagtctgatacagggttacttttaccctttagattatgtggctagtagacgtctttagagccaacgttgtggatgcatcagaaagctcgttgactatagaggtacgtagcttcttattcattcaatctgaacagttgcatactcccacagtctcactgttttgttattagaacatgcgtcaacaaaaaaaaaagtttgtaattttgataatattgctagtaattatgtaatgctaattttatcatctggtcaatttaggttaccggggatcctgggaagattgttgctgttcagagaaatttagccaagttcggaatccaagagctcactagaacaggaaaggtatgcaagcacaagcataagttttctaaatttctgttatgtgttgcatatatttcatagaaatttaaattttctaccagaatgatagttggtcgcaaagaccataaatgtccattgaatctcctgactgaatttgttgtaacttttagatcgctctaagacgggaaaaactgggtgaaactgctccattttggaacttctctgcagcatcttacccagatctagaatccgcaactccaattgctacttcttcaagtgttacttgcactgttgatgaggattcgactgcaatgtcaggggtaacctgtctaatctttaaaggctttccttgcaatgttttgctccctaattgcatatcaccaccttataactctattctgtttagcatttaggaattgtgacagagatagaaaggcaatgtataaaatatcaatgatacaattgaatgataaaatgataaagacttttactttgatttctgcaagacacaatatatgtaagttactaaatctgcagtttcacacaacaattaattctttagttggcacactttcactgtgtctggtactgcttagaccaaatttctacttatttaacactttaatctgttaagtggttaacaagatttgaacaacctagttgttaaattgatttttgatttcatttgagttattaataatcttgtttgaatgaagggtgatgtgtatcctgtggagtacaacaatagctgcataatggatcaagttcttgacgccaattggggggtagtctatgatgaagatgtaagatatcaatttatcatctttcatttgttccttatcgctatatttatacttgatccctttattgatgaaagacaattatatcttagatggatcataacttatatgtttcgccaaacacacttctagtttctaagatagcgaacagttcagcttaattagttaatattcttcaagctaaagatgtatgttgttattctcattctaacacccacaggttgttactatttagaaaaggggaaatagttatggcatataatcgtgtttactgaggcttgtgactactcatagatttcacttttgacacccaaattaatgttgcagtcaactggtcggcagtctcatactttaaacattctggtcaatgatactcctggagttctcaacgtggtcagtggagttatatccagaaggggttacaacattcaggttcttcttcttttttgctaattctgaagatacaattgttttaaagtaagatgtagtttgcaaataatactaataatcgtctttggaactggtgtcaacagagtctggccgtaggtccagcagaaatggagggtttatctcgcattacgactgtgattgctggtacagatgaatctatttacaagttggttcagcagttccgcaaattggtggatgttcatgaggtgagatttatttctttaaagttaaacctcttgaaattctcataaaatcgaccactataattttcgctgtatcttacttcaggcatggaaaacttataacttaatgaaagaaaatattgtttatatttaggtcaaagatatcacccatctaccatttgcagaacgtgagctaatgttaattaaagttgctgctagctctgctgttcgaagggatgtcctagacatcgccaccatctttcgagccaagcctgttgatgtttctgatcacactctcacactagaagtaaattttctacgtattgattttgaggtgtttctatgtcaaatattcttgtttctgatatcttctgttattcatatttcagctcacaggagacttcaacaagttgtttgcattgcaaagattgttagagtcctatggaatttgtgaggttcgttcaaacttttgacctcgaactccaatactgggtttcacttttcaatcttctgcacaactttattatggcctgctcctatctggttagggacttggggttctccccagcaattcattctctcaaacccctagtctcgacattgtatcatgcctcactctgatatatcttctattttggagctgtattactatccaaattgtgtttattacacgaaatattattactagtaaaaacaatagtcattaaggtataactgtgcatggtctttgatgctgttttctctgcattgcatcatttccctaatggtgcctaattgcattttaatatgcaggtcgcaaggactggtcgagtggcattggtgcgagagtcaggggtcgattctacatatctacgtgggtactcccttccgttataataacaccggaagttatccctcaattgtatgttgcattattgtagctgcaagtgaacacaactgttcagtgtcttttgcactgatggctgcggatgtgagagtatgacttcttgctagaaaaagaaaaaaggaatgtttagtagatcaatttatgttgtattatggtatgccgtgtgatgtcaaaactgtaacagctttcattcatagaagtttcatacttaaaatgtgatgttaagcaaatttataagtaataatgtttgtacttctatacttctatataaaagttataatcccatattgaaagttaaaaaaaataagacatacaaattgactaaattacttttaatgaattaaaatcaccaccctttaatattaaattacaccatcagctccttatattataaaagatttatattaccttctttaaatcaaacacgtttacattaattacctacaccatttgacgtcgtgaccaccatcaccatccgtcgccgccatcatactaccacattgcgcgataatgtgctagttatatacctagagattattggtggaattggttgaaatatacgagtctttattttgtcaacgttatacactcgaggggtagaactgaacaaattatgtatgtacttggtggaacggtgggacaaaatgaggagaaaagctatataatacttgtccctgacttcttgagccattttaatgaagcaaatgtcctccaaaaaaccttttttcttcgggtcgagcgttagcatcattataacattttagactaatttctaagcattccattatgatcctcagtataccagactttatacagctttgagaaataaaacacttgatatttcttgcacaaatatttgccattatgatctcagtataccagactttataaagattatatatacaaaacccaagtaacccaagacttaacaacattcgacttctaaccttaataagtaatacatcacatacccatccccatcccatccacccaaaagccgagaaaaaaaaaagttatgaacacataattaacacttatactcgaggcaaaaaaaactctcaataaccatgccctcttctggagacctggacaacgtataagaatcattctcttgtcaaaatgaatatatatcgagatcaggaagatgatcacctcatcttgtgaataactaagccagataactcttaaggagtatgcagatcgcgtaaatggtcaacaacatcacgtgaaccagtcaaccacttgatatcagaacggtgaagtacatttgcatggacacgggctgaattatcaggtttctgctccataggcattgacctctctgaaaagctgtgggtatggcgcacacgaactctgtgacattttgtttctgttgtacagctgcccctcacttcaaccatcaacataacttccttatcacgaacgtcttcgcaccagcagttttgcggagcaccatctacatattcctctagggtttcatatccttggtgatgaactgatatctctacaatatgatttggctctattatacccactgttggcttgacctggttcaaagcaatagacaattgttagctaccttcaccgtgagtgcatcacaacaaattttttagtccaatgttcaatgcatgtgataaattcacctcaagccatcgtggaaagccataagaacctcttggacggtgactggaagcctgttttccatctttaatagtacactggccttcacatataactttaaacagagcttcatcttccccgcatttattggtaatcctcaagactgatgaatccctgtcatgaagaattatattgttcgtactgggaatagcttctggaacattgcactgttcttcaagaatactcctaatttttttattagatttgataacttctccaaatatttttcttcttcttgactcatctactcgagccagttccacgttaaagatgcaacgcacaggcttatgatcactatctgtcacat

SEQ ID NO: 1747 - DNA, 5498 bp, Conyza canadensis
ttagattagggtcttgcttacaatgttgttatttaaattgtacatttttgtcagtaattttagtgtaaccgaggtatttagctcaactttttttggggttaattgtttcaactactcgtaaccgaattttgattgttgtttaagattctcttgcaacaaagttctcaactttaagcctatagtatgaacatatttccttggagttatcccagagagatattcgagatacctaggcacatacgggtcaataagttatttagggaaaatgattacagtatttggaggaatacccgttgcaccgaaactcttccaacatgtgccagtacatttgtaaagttactgcaacttagtaaactctatgggtaatacaaccatgtgtttacaggtaggagtatctttttgataaaatttatttggtttatgtattgaccagggtgaagcgccacactatctcggtgttcgtaggagatgaaagtggtattataaaccgaatcgcaggagttttcgctagaagaggttataatatcgagtcacttgctgttggtttaaacaaggacaaggctttgtttactatagttgtttctggaactgaaaaggtcttgcaacaagtggtggagcagctcaacaagcttgtgaacgtcataaaggtttgtatgaccatcaaatgtgaatcttgggtgctctttgaactttatacatgattaacgtgtttgatgtatcaggtggaagacctttccaaggaaccacaggtagaacgggaattgatgcttgtgaagcttaatgtagatccaaccacacgagctgaggttttagtgttttgcatacttctatgatattcaattatagaaaatggcagagagaatattttatttgagtctgatacagggttacttttaccctttagattatgtggctagtagacgtctttagagccaacgttgtggatgcatcagaaagctcgttgactatagaggtacgtagcttcttattcattcaatctgaacagttgcatactcccacagtctcactgttttgttattagaacatgcgtcaacaaaaaaaaaagtttgtaattttgataatattgctagtaattatgtaatgctaattttatcatctggtcaatttaggttaccggggatcctgggaagattgttgctgttcagagaaatttagccaagttcggaatccaagagctcactagaacaggaaaggtatgcaagcacaagcataagttttctaaatttctgttatgtgttgcatatatttcatagaaatttaaattttctaccagaatgatagttggtcgcaaagaccataaatgtccattgaatctcctgactgaatttgttgtaacttttagatcgccctaagacgggaaaaactgggtgaaactgctccattttggaacttctctgcagcatcttacccagatctagaatccgcaactccaattgctacttcttcaagtgttacttgcactgttgatgaggattcgactgcaatgtcaggggtaagctgtctaatctttaaaggctttccttgcaatgttttgctccctaattgcatatcaccaccttataactctattctgtttagcatttaggaattgtgacagagatagaaaggcaatgtataaaatatcaatgatacaattgaatgataaaatgataaagacttttactttgatttctgcaagacacaatatatgtaagttactaaatctgcagtttcacacaacaattaattctttagttggcacactttcactgtgtctggtactgcttagaccaaatttctacttatttaacactttaatctgttaagtggttaacaagatttgaacaacctagttgttaaattgatttttgatttcatttgagttattaataatcttgtttgaatgaagggtgatgtgtatcctgtggagtacaacaatagctgcataatggatcaagttcttgacgccaattggggggtagtctatgatgaagatgtaagatatcaatttatcatctttcatttgttccttatcgctatatttatacttgatccctttattgatgaaagacaattatatcttagatggatcataacttatatgtttcgccaaacacacttctagtttctaagatagcgaacagttcagcttaattagttaatattcttcaagctaaagatgtatgttgttattctcattctaacacccacaggttgttactatttagaaaaggggaaatagttatggcatataatcgtgtttactgaggcttgtgactactcatagatttcacttttgacacccaaattaatgttgcagtcaactggtcggcagtctcatactttaaacattctggtcaatgatactcctggagttctcaacgtggtcagtggagttatatccagaaggggttacaacattcaggttcttcttcttttttgctaattctgaagatacaattgttttaaagtaagatgtagtttgcaaataatactaataatcgtctttggaactggtgtcaacagagtctggccgtaggtccagcagaaatggagggtttatctcgcattacgactgtgattgctggtacagatgaatctatttacaagttggttcagcagttccgcaaattggtggatgttcatgaggtgagatttatttctttaaagttaaacctcttgaaattctcataaaatcgaccactataattttcgctgtatcttacttcaggcatggaaaacttataacttaatgaaagaaaatattgtttatatttaggtcaaagatatcacccatctaccatttgcagaacgtgagctaatgttaattaaagttgctgctagctctgctgttcgaagggatgtcctagacatcgccaccatctttcgagccaagcctgttgatgtttctgatcacactctcacactagaagtaaattttctacgtattgattttgaggtgtttctatgtcaaatattcttgtttctgatatcttctgttattcatatttcagctcacaggagacttcaacaagttgtttgcattgcaaagattgttagagtcctatggaatttgtgaggtttgttcaaacttttgacctcgaactccaatactgggtttcacttttcaatcttctgcacaactttattatggcctgctcctatctggttagggacttggggttctccccagcaattcattctctcaaacccctagtctcgacattgtatcatgcctcactctgatatatcttctattttggagctgtattactatccaaattgtgtttattacacgaaatattattactagtaaaaacaatagtcattaaggtataactgtgcatggtctttgatgctgttttctctgcattgcatcatttccctaatggtgcctaattgcattttaatatgcaggtcgcaaggactggtcgagtggcattggtgcgagagtcaggggtcgattctacatatctacgtgggtactcccttccgttataataacaccggaagttatccctcaattgtatgttgcattattgtagctgcaagtgaacacaactgttcagtgtcttttgcactgatggctgcggatgtgagagtatgacttcttgctagaaaaagaaaaaaggaatgtttagtagatcaatttatgttgtattatggtatgccgtgtgatgtcaaaactgtaacagctttcattcatagaagtttcatacttaaaatgtgatgttaagcaaatttataagtaataatgtttgtacttctatacttctatataaaagttataatcccatattgaaagttaaaaaaaataagacatacaaattgactaaattacttttaatgaattaaaatcaccaccctttaatattaaattacaccatcagctccttatattataaaagatttatattaccttctttaaatcaaacacgtttacatcaattacctacaccatttgacgtcgtgaacaccatcaccatccgtcgccgccatcatactaccacattgcgcgataatgtgctagttatatacctagagattattggtggaattggttgaaatatacgagtctttattttgtcaacgttatacactcgaggggtagaactgaacaaattatgtatgtacttggtggaacggtgggacaaaatgaggagaaaagctatataatacttgtccctgacttcttgagccattttaatgaagcaaatgtcctccaaaaaaccttttttcttcgggtcgagcgttagcatcattataacattttagactaatttctaagcattccattatgatcctcagtataccagactttatacagctttgagaaataaaacacttgatatttcttgcacaaatatttgccattatgatctcagtataccagactttataaagattatatatacaaaacccaagtaacccaagacttaacaacattcgacttctaaccttaataagtaatacatcacatacccatccccatcccatccacccaaaagccgagaaaaaaaaaaagttatgaacacataattaacacttatactcgaggcaaaaaaaactctcaataaccatgccctcttctggagacctggacaacgtataagaatcattctcttgtcaaaatgaatatatatcgagatcaggaagatgatcacctcatcttgtgaataactaagccagataactcttaaggagtatgcagatcgcgtaaatggtcaacaacatcacgtgaaccagtcaaccacttgatatcagaacggtgaagtacatttgcatggacacgggctgaattatcaggtttctgctccataggcattgacctctctgaaaagctgtgggtatggcgcacacgaactctgtgacattttgtttctgttgtacagctgcccctcacttcaaccatcaacataacttccttatcacgaacgtcttcgcaccagcagttttgcggagcaccatctacatattcctctagggtttcatatccttggtgatgaactgatatctctacaatatgatttggctctattatacccactgttggcttgacctggttcaaagcaatagacaattgttagctaccttcaccgtgagtgcatcacaacaaattttttagtccaatgttcaatgcatgtgataaattcacctcaagccatcgtggaaagccataagaacctcttggacggtgactggaagcctgttttccatctttaatagtacactggccttcacatataactttaaacagagcttcatcttccccgcatttattggtaatcctcaagactgatgaatccctgtcatgaagaattatattgttcgtactgggaatagcttctggaacattgcactgttcttcaagaatactcctaatttttttattagatttgataacttctccaaatatttttcttcttcttgactcatctactcgagccagttccacgttaaagatgcaacgcacaggcttatgatcactatctgtcaca

SEQ ID NO: 1748 - DNA, 1105 bp, Conyza canadensis
ctctctctctactttctattgttttctcttgagaaaaagttggaacctttttctcagaaaaagtgagaaaacttgcgttgggaagggccttaccaactttatatacacatagaattcagttgtgttgcatacttgcatgaggcataagataataagggagctcaaattctgacattaatggaatttcaccctaacaataatatctccattctcttcaaatccgatccttagttttctacagccacatcatcgccacatcatacacatatattatacatacacaaattcaaaaattctctcgtcttcccgaggataccatcccagaacttgggtagaacgacttcgtaactataaagttttgagaaagcagcttcggaacatagaagaacgtgctccagaacgtgtggtggcaataaagacacgagaacttgggttctagaacgccttaattattatcttaatcattatcatttagtatcatactagattttagacccgtgtcaaatacccgggttttacaacattattgatataagaattagtatatggaaaaaaattatacgttaaatgtaaaaatacacttaaaaaaactgagatatttaaatgttaatactgaatgctaaatcatataattaaggctggatggtgtaacaaagttgtctttgatacacacttttatagaaaagcaatatcttaactttgattacactattgactgagttttcattgatgtcttgcaaaaaagtaattttattttttgtcagacatgattgttaagaacaataaaagtagcggctgtttcgcgagatttttaaagatttcgtttattgttatttttttttatgttcaatttatataaaaaaaatctatatcctaataaatatagtttgattccaattaataataacaacaatgattatcctaattttagtctgattaggaatagtaataatatttgattatagttaataatataaaataaaatattgatataaatatgtaaacttactaacttttagctatattttgttattaaattagatattatgcaataaaatattaattatttttaaattggattaaatgtgtaaattggtgatggaaa

SEQ ID NO: 1749 - DNA, 246 bp, Conyza canadensis
aaggaaaggcgaaatgaattgggtggggtggaagaggaggtggactgtcatgtcaccagaaaggccatatcacacgctgacgtggcaaaatattgctatattgagtaatttttgaaaggtcatttctaatatcgacaagttttaaaggtgactgctagttgcgtgaattggaccaaagttgctttctattttgtgcggatttcccttaaaagaaaggaaagtgatggaaaggaaaagtgaggggtt

SEQ ID NO: 1750 - DNA, 598 bp, Euphorbia heterophylla
ggagccttatgatgaattctctgtgcatcaagttctcgatgctcattggggagttctctatgatgaagattctagtggacttcgatcacatacgttatccatacttgtgaatgattctcctggtgttctcaacacgattaccggggttatgtctcggcgaggttataacatccagagtcttgctgtgggtcgagctgagagagagggactttctcgcattacaactgttatccttggaaatgatgatacagttagaaagttggttctgcaacttcacaagttgattgatatacatgaggtacaagatattacacatttgccatttgcagagcgagagttaatgctgataaaggtggcagtcaatactgcagccaggagagatgtcctagatattgctagcatatttcgggccaaagctgttgatgtgtctgaccacacaattaccctagagcttactggtgatttaacaaagatggcggccctgcagaaactattagagccatatgggatttgtgaggcagcacggactggaagggtggcattggtgagggaatcaggagtggattccacttatctccgtgggtaccatctccctttg

SEQ ID NO: 1751 - DNA, 598 bp, Euphorbia heterophylla
ccccccttacctcgctccaaggtgcagttgcacacgatatcagtctttgtgggtgatgagagcgggatgataaatagaatagctggcgtttttgctagaaggggttacaacattgagtcccttgctgttggtttgaacaaggacaaggctctttttactattgttgtttccggaactgacaaggttttgcaacaagttgtcgagcagctcaacaagcttgtcaatgtcatcaaggtggaagatatctctaaggaaccacatgtggaacgtgaactgatgcttataaaacttaatgtggatctagaaactcgtcccgagattatgtggctgttggatgtcttcagagctaaagttgttgatacctcagagcatacaatgactattgaggttaccggagaccctggtaaaatggttgctgttgtaaggaacctaagcaagttcagaatcaaagagatttctagaactggaaagattgctctaagacgggaaaggatgggcgagacagcaccgttctggaggttttctgcagcttcctatccggaccttgaaagtatgcaacctggtgctgttgaaaatgtgcaacctgctggtgcctcac

SEQ ID NO: 1752 - DNA, 595 bp, Euphorbia heterophylla
gatagctttaccgtaactcaagttctcgatgctcattggggtgtcctcaatgaggaagatacaactggacttcgatcccacactctatctatggtagtaaatgactctcctggagttctcaacatcgtgacaggggtatttgctcgaaggggctataacattcagagtttggcagttgggcattcagaaattgaggggcgctcacgaattacaactgtggttcctggtactgatgaatcaattagcaagttggtgcagcaactttacaagctaatagagctccacgaggttcgggatcttacccacttgccatttgctgaacgagagttgatgctgataaaaattgcggtgaatgctgctgcacggcgtgatgtcctcgacattgccagcatattcagagcaagagccattgatgtatcggaccacacaataactctcgagcttaccggagatctcgacaagatggtcgcattgcaaaggttgttggaaccctatggcatttgcgaggtggcaagaacagggcgaatagcattggttcgagagtctggtgtggattctaattatctccgtggatactcgtttcctatataataaa

SEQ ID NO: 1753 - DNA, 5587 bp, Euphorbia heterophylla
attgttgagtttaaaaatgcaaaattgatataatattttttattatgaaatagatgtagagagtactcataatttagtattttttttaaaaaaatcgaaaccaattcaacttagccgtgtctgaaaatattgaaggtggtttgtttgaaatgagaattaacaaataaaagccggcccaaacccgtcgcaatccgggccaggaacggtggtaataatgaccaattgcttaagaaactcattagcccatattattattttgataaaaggataaaagtaatttacacgcgtgataacgccaaattagcggggacatattagcaaataatttgaaaataattaggaaataattaaagtttaattatgtaaagacaacagtgtagtccgtagtagatagaagaggcgaaggagaaggtggttagtactggagggcgaaaggacagaagaagcagaaaaatatcacattttaatggtgttttgttgtggtttatcttattgtactgtatgaattgcggcgcttccgccatctgcgtcccctccttaagatctcattatcttgttaatcttactaccactacaatcacaatgcctgcggctgctgctctctcatcttcccttgttgccgccgcaccctctcacgattcctctcctttgacaactccttttttaaggagcagcagcagcagctcggccccattcccttttctccggccaaggaccaatgctcctcttaagctctccgctaccctcatccaccaccccggaaaccaacccgctcttccccccttacctcgctccaagtataagtctcacgcttttcatgcttcttggatttttttctagtattaggctgcaattttatgaacttaactgaagctcaactgtaattgaacttatttcggtacgaatttataactaagcatacctgaactgaaatggatcagtctgattgtattctgagagaacagggccttagtacttccgattccatgtgaaaatgcttctgtcttgttactgctttttatttatgtgtttccttttcttctatattttgaacttcatggcctgatttttatatgatgaatcttatgagttcgttatgatttttgttctaagttgcagggtgcagttgcacacgatatcagtctttgtgggtgatgagagcgggatgataaatagaatagctggcgtttttgctagaaggggttacaacattgagtcccttgctgttggtttgaacaaggacaaggctctttttactattgttgtttccggaactgacaaggttttgcaacaagttatggagcagttgcagaaacttgttaatgttttgaaggttgtattcttatttcgagggagtccctttatctactgattttagttttatggttataattgttggcacatagtccaattgaagagaaatggatactggatatatagaagagacagatttctatttgcctattttcatattatggcttttgttacattgttcggattgtaatttctccatatgctgttgtttactatgatatttaggttgaggatctatcgtccgagccacaggtagaacgtgagctaatgcttattaaactgaaggcagatgctaataaccgtgctgaggtaactggattttcatcgttgttgagtatggaaatgctttgaggattccaatttgaattgctcccttgttttcttcggctacattttgttcttcggtgtgattttcagattatgtggttggtggacatcttcagagcaaaaatagtggacatctctgagcattcagttacaattgaggtaaatgatttgttaattgattccaattctagagataaaaagatcctagtggatgacccctctgatactttaaaaattaaagattattaatagttgtttaataatattgacaaatgaatgaactggaaatattgaacatattgttgttgaaaagttgtgcatattaattatgaagttaagtttgatgcaaacttgtagctaatcatttttctagtaatttagtttcaatgatagtatcagtgtaatatatgatatgtggaaatttttaagggctttaacatcttaatttttcagcattgctatggagtaataggagttcacttttaactaccaaatatgtttctgttatgattttttaacattgttcctcatttctgatgcttgtgttggtagccatgcttttcatgatatactaattgctatagttgttttagtctttccattacttttacttgtaaaatatattaagtggtatattagtttgttgagcttggtgaacctccatattttatttatcttttataccaagtgcccagattgtttgtggtttattatggctatgttttttttcccattgcatggaaaccttggaggcttgaacagaattctagtttatgtacggtagttttgaaaaatgatgtgcgttgaaagtgtagttgaaatttcaaatcaaatgcaccttttgaaattcctaaaggctaatttattgttattggtttaggtgactggagatccagggaagatggttgctgtcgagagaaacttaagcaagtttggaattagagaaattgcaagaactggaaaggttgtgttcagttttctttttattgtggctgttttgtaggttttagtttgccgttgattcgtgagcctgctgttctgaatagattgcattgagaagggaaaaaatgggggcttgtgctccattttggcgattttcagctgcttcatatcccgatcttggagaaacaatgtcgaataattctctcttggaaactaaaagttcagcaattgtaggggaagacaccacatcttcaggggtatgtcaatgtcaagtttttattttctttgtttggtgttttttcgagactatctgaaaaattacaactttatgagcaaatccagggagatgtgtatccagtggaatcgtctgatagctttaccgtaactcaagttctcgatgctcattggggtgtcctcaatgaggaagatgtaggtctgcttattttcaattccatctttttttttccggtcttatagagcgcacattaatttgtcgagtatttcagacaactggacttcgatcccacactctatctatggtagtaaatgactctcctggagttctcaacatcgtgacaggggtatttgctcgaaggggctataacattcaggtatttcttatgactttcttctctggtttgaccttgtttcccttaatcctagaatggattgaagaacaaatgattttctcgtctttggcggcagagtttggcagttgggcattcagaaattgaggggcgctcacgaattacaactgtggttcctggtactgatgaatcaattagcaagttggtgcagcaactttacaagctaatagagctccacgaggtcagaaaacttcaccaacaagtgtcaatttttttgagtaaataatgtgttttgtgttttgatgtaatattctattgttttgaaacaaaatgcctctattaccaatctaatgtctcggagaaaaaagaactttttggtccctgtgctataaactttttggccatttggtccatgtggtatacacttgacctttttgctccctattctatgcaatatattacctttttgtccagatgttttcaatcattattcattacccatttggtccatgtgcaatgcaatttgtttatctttgtggaccttgttcgatagagacttaattagtgatatgtcacatattatgtactagagggacaaaaaaggtaacaaattgaatagcacagggactaaataggtaacatgtatatcaccaaaaggacaaactgatgatacaacgaggctcgaaaaggtctttttgccaatatctcagcctttgaaggttgaatcttgtatttggtatatatatatatatttatataaaggtcttcaatcttgtaaatggtgacttgtccaggttcgggatcttacccacttgccatttgctgaacgagagttgatgctgataaaaattgcggtgaatgctgctgcacggcgtgatgtcctcgacattgccagcatattcagagcaagagccattgatgtatcggaccacacaataactctcgaggtaattttcacattatcttgtcattgtgtttagccgacaatatgctcaaacttatcgccttttttcatccctggctgatgattttgctttgaattctgtttccagcttaccggagatctcgacaagatggtcgcattgcaaaggttgttggaaccctatggcatttgcgaggtttgtggttaaaactgtctcttccttatgccataacatctttttaaaaattatatctttaattctttatctttttataggtggcaagaacagggcgaatagcattggttcgagagtctggtgtggattctaattatctccgtggatactcgtttcctatataataaataggccacacttgttatggtaatccccgagtttaaactggcttttggcttttggcttttgtatcagtgttaacagttgagtgctctagacacattgttttatttctttttcatacacaaatagtattgaagttttgtttataaatttaaaaatgaacttcacgggtatttatttttttagcaactaatcgaaataactaaaatccggaatctacatagaaaatgagcaaaccagagaagcctgtcatatatatagaagacaatcaactatcaagtaaataactacaaaatcagtctcgggctacgacaaccaattgtttcccgacattatggccagaaaatatccctataagagcttttggagcttcctcgaggccttctgctacatcttctacatacacaaattttccttccttgatgttagggataaccaattgtaggaatttcgggtagaggtgatagaaatcaccagccaagaatccttccattcgaattcgtttcccaatcacattgcctaggttatatattccttcgggattttcaagattgtattgagaaatcattccacacaccgcaattctacctcgaaccctcatgtttaggagcactgcgtccaacattttccccccaacattctcaaagtatatatctatgccttccggaaaatacctgcaattccaatacaagacaatcaaagctatgaagcacttggttcaaattcaaaccatggaaacttgacagaaaaaataataaatttaaaaaatttaccttttgagtgctgcatccaagtcaggttcttccttgtaattgaaagcctcgtcatacccgaacttatttttcagaagatcaacctgtaagaaccaaggaaaacgcaactcaacaaaaacctttagaaatgtttacaagttttcaggaggttgttgtaaaatgccaacataattcgtccaacggcctctttgaaagacgattttgcccttatttgcgtaatgaaaacctgaattttcacggcgcataaattaccttctctttagagccagcgcttccaacaacatagcaacctgccagttttgccagttggccaacaatctgaccgaccgcaccagaagcagccgatacgtagacatattctcct

SEQ ID NO: 1754 - DNA, 4073 bp, Euphorbia heterophylla
ataggatctgataaatttctgttccgttgttcatcagaagaattttttttttactatgagctcaaattaagaaataaagcataaatgtcagggtttttatgtaaaaacaactgaaatatacaacttatgaaggagggtttgtgatctgtgtgtatgccaggtgattgtcacttaagtagtataaaagttcatagcatgcaaaatcaagactactatatgttctttttaaatgtgtgtactatgctatggcaaatagccttgtaatgaagcttgaattagcactaatatagattgctctaagacgggaaaggatgggcgagacagcgccgttctggaggttttctgcagcttcctatccggaccttgaaagtatgcaacctggtgcagttgaaaatgtgcaacctgctggtgcctcacccggtagtcctgctactaattttacagagaattcaaatggttccattaatggcagaaccatctcatcttcaaaggtttattatactttaatatattatttggtcgatctaatatcttattagatatgtccaatattatttgtgcactaccatgccttgaatatgccatgtcttgaatgaaacttttagtacatctacatggagatgtgtacaatactactgatctgaattattattaatacactagatacagttaatcatcagatagcatcatgtgtttagtatcttctgtagaaagataaagtgtgcttgaatgaagataaataataccttaattgaatggttcggaagaagagcttgctgttatttgtcgaggatatattttttctatattgtctgcttgtctgtgttctgggatggccatccatttgactgcaagttatattaccatgatgatcatgaataaggatcaaataatatccggttgcaactattctcccgtttttacttttaggaaagataatttagttgatatttaaacctttctgatgcaatagttgtcaaaagctcttatcctgctcaagcctcattgccacctgccaggttcctcacatgcaaaagatccgcacctagatgctctaggcttttggtgctataggctctaggtgctctaggcgtgcgcctcacaccaaaattaagttgtttttggaaatataacaatttaggtgagtttagactttatggtaaaaacataattaggaaatagaaattaagaaagaaaaatccggaaaggaaaaatatttttgtatggaaaatattaattatggaggaacaaaagttaggaaatggaacaataaaaatgaggaaattagagaaactacgaaaaaaattaaaataaggaagaaaatagaattgagtgagagaaataggtatgaaaagaaaagaaagacacttggatgttgatttcacaatcagctactaaactactaataaggcattaaaataactatttaggtccttacacaattttttaactgcaacgtatatatatacagcaaatttacggtgcttcttaattttttagctattgaaattcaatttatttatagttcatttacccccttacgcctagtatgcgccttaacaattgatttgtgtatatggtttcttatttttactctacagaacttgtattctaattccatttgtttaatgaacttgaactcacgtgtatggctaaatctgtatgttaattttcaatttaatttagttctcctttaacttgtgtgtgtgataattttgcattatattgttacattattaaaggcttacttcttgtttatgccttctcaatctaagggtgacgtatatcctgtggagccttatgatgaattctctgtgcatcaagttctcgatgctcattggggagttctctatgatgaagatgtaagacatgttcaaagtgatcagtttctatattgcttcatctttcattatcatgttactttccatgattgaacatcacatgctctattattaaaaataggaaattttgttggctttgttttctgtaacttaatttggaagttgtaatataattattttacgaggtaggtataattaagtggatagcataggctatagttatctcacctttcattctcatattgactttatatttcctttgttgttttcaattcagtctagtggacttcgatcacatacgttatccatacttgtgaatgattctcctggtgttctcaacacgattaccggggttatgtctcggcgaggttataacatccaggtctgcatatttcatgttcatctctatttttcttccaaaatgtttagtgacttgtcattgttgttattgttttttttcactttaatctattagagtcttgctgtgggtcgagctgagagagagggactttctcgcattacaactgttatccttggaaatgatgatacagttagaaagttggttctgcaacttcacaagttgattgatatacatgaggtaagtggtggtgaaattaactttttccctcatatttgtaagtgcataatcaagcaacatgtgacattataagaaagggaaaactaggaagaaaaatttgacgaatacagtgactggcttttatgatatccaagttgaaactgcagttttcttgtgagatagtttgagcattttgtcctataaggctgtaactgtttggaagaacctggaacaaatttaagcttcagtgtcgtacaatgtcatggtctatatgtttgctaatgatttattcttgaggagtaggcataatttaaaatattattgaagtataatcttgtacccatactttggtgatccgcccatgataattatacttcatgtcatgcttattttctttccaaataaagaatctaaagttttattatttaactatggtgtatctccacagagtaatttgtgtgtgtgtgtgtgtcttttgtttttgacaaattcatgacccatttgagtgaatggataactatggtgggtgcttgattcaggtacaagatattacacatttgccatttgcagagcgagagttaatgctgataaaggtggcagtcaatactgcagccaggagagatgtcctagatattgctagcatatttcgggccaaagctgttgatgtgtctgaccacacaattaccctagaggtagtggcttcctatgcttgaatgattagctggcttgctctttgctaatataatttcacaactcaataatgatcatgattcacgagccaatatcaggctatgctcttgagttctctctatgtgtttttagtgaagttgagttattttgtttgtttgatctttttttattattggcgtggcaagttcaaatctataccctctaactggcttgaaatttgagttcccttttttctttgtgctacggcagtttatgcacgcagtcacaatatattccgttagatgtctagtataactgtgtgaagtttgaagtattgatgatagaattggatggtatgtgattttgatttttcgacaatgcacttcatatggtagccggccccatttagcatgggatattaagggtttgctgttgttgttgcacttccaccaaggaagagcttgatgcctattgatgcctttttctatcatctccatcagtagctgttgttggttttccaaattttatgacttcactgattatgttatcatttgatagcttactggtgatttaacaaagatggcggccctgcagaaactattagagccatatgggatttgtgaggtcagtcatttcctgccaagtttcaacaagtaaagatgtttgtttgcctatgtttctctaaacattgacaatctttgtttattttgtcaatttctgtttttatgtttacaccaggttctttatagtatatatgttcagaacagaagttttttaaatctgttccactaacttggcatgtaaagctggatgccactgtgaactttcaaaagttccaacccttgaacttggcaaaagtgtatcagtttgccccctcattgccatgcgtcagcttttgattggagaaaggaagttcagaacaatgacatatttgaaaactcaaaccaattagaagctgacacgtggcattgagggagggggggaaa

SEQ ID NO: 1755 - DNA, 2403 bp, Euphorbia heterophylla
aaaattaaagaactaataaatgataataatgacgattacaaactacaaaagtttgaacaaactaaataatcaattaaaaatactaaaattaagaaggtaattacttcgtaaaaattataaatttggctaaaatattttaaattttacttgagacttgagaatataattaattagtcgaaattggacctaaataataaagaaaaactacacttaataatcactcataatataaactcaacaaacacaaggtctcgaacataacaataatataaacattaagaatctaataagtactacatattatacaaatttataaactctttgctttattcttttttaatctcttctgtcaaatatttattttgcaatatatacttttaaattttgttaattaatttggtttggtttttatcatgaaaaccgaaaattgaaccaaaaccaaaccaaaaccaaagtattagaattttacaaatcaaaaccaaaccctatagatacataagaacaaacaataaatatgttatatcctaataaatcgatttgattttcttattgttaagataaaaaatgcaaaatcacatattacaaatcacaagagaaaaataatagaaggaaaagaaaagaaaacgcaagaatgaacccatattcacgaacaacgatctctattgagagaaaatgatagcgaattctggttgaatgagctgcaagtaatctttcctaatttgtaggttcgcatattttgcttaattagtttgtcaattattttgttttaaagacgcgtgtttctttgttttcaattataagtgcaatttcatattgtttccattaaggtgtaaggtatggttactttattttttttcaaaataaatcatactttacctcttaacacaattggatcaaaatagcaaccattcatcttatggtgatagaaacaacataaaaattacttcggataaccatataatttccctttcattaattatcaattaattatcgatggtcaaaagatcaatatctaagttgttttataaaaaatttaggagtttttaacaatttgatgtacgaatgttatattttgaaaatattatttaattttgttaatcatttcccattcttctctgtttctctttagctctcaaatctctccttggcacactctcagtctaatggccgccgcaacaattcaaaccttcaaaacctcttctttcccttccacatcttctgcttcaattgcttctcttggcatagccaactcctcaattacgatacccctctccaaattcacttccaagcataatttttccaaaaaatctctcaaggtctctgctaccgctgctgatgatgacggaaaaatttcccatacccctttccccaataacggctctctccctccaaggcccgtgtcaaagtacgttgctcgctaattcactgcttaaagcttgtttcttttgaacttatgtgatcatatatgggcactctgccatctggtttaatttgggggtttttccttttgacggaatttgaacatttaaaattgaggggtcatcaaattaagctttgggatttctcaatttcacatgtattttagtgattgttcgttattgattgattattgtttgttgcacattgtgatgggatttagggttaggcggcatacgatttctgtgtttgttggagatgagagtggaatgatcaatcgcattgctggggtttttgcgagaaggggatataacattgagtcccttgctgtgggtcttaataaggacaaggcgcttttcactatagttgtctctggaactgaaagggtgttacaacaagttatggagcagttgcagaaacttgttaatgttttgaaggttgtattcttatttcgagggagtccctttatctactgattttagttttatagttataattgttggcacatagtccagttgaagagaaatggatactggatatatagaagagacagatttctatttgcctattttcatattatggcttttgttacattgttcggattgtaatttctccatatgctgttgtttactatgatatttaggttgaggacctatcgtccgagccacaggtagaacgtgagctaatgcttattaaactgaaggcagatgctaataaccgtgctgaggtaactggattttcatcgttgttgagtatggaaatgctttgaggattccaatttgaattgctcccttgtttttctcggctacattttgttcttcggtgtgattttcagattatgtggttggtggacatcttcagagcaaaaatagtggacatctctgagcattcagttacaattgaggtaaatgatttgttaattgattccaattctagagataaaaagatcctagtggatgacccctctgatactttaaaaattaaaga

SEQ ID NO: 1756 - DNA, 1780 bp, Euphorbia heterophylla
tctgatactttaaaaattaaagattattaatagttgtttaataatattgacaaatgaatgaactggaaatattgaacatattgttgttgaaaagttgtgcatattaattatgaagttaagtttgatgcaaacttgtagctaatcatttttctagtaatttagtttcaatgatagtatcagtgtaatatatgatatgtggaaatttttaagggctttaacatcttaatttttcagcatagctatggagtaataggagttcacttttaactaccaaatatgtttctgttatgattttttaacatttttcctcatttctgatgcttgtgttggtagctatgcttttcatgatatactaattgctatagttgttttagtctttccattacttttacttgtaaaatatattaagtggtatattagtttgttgagcttggtgaacctccatattttatttatcttttataccaagtgcccagattgtttgtggtttattatggctatgttttttttcccattgcatggaaaccttggtggcttgaacagaattctagtttatgtacggtagttttgaaaaatgatgtgcgttgaaagtgtagttgaaatttcaaatcaaatgcaccttttgaaattcctaaaggctaatttattgttattggtttaggtgactggagatccagggaagatggttgctgtcgagagaaacttaagcaagtttggaattagagaaattgcaagaactggaaaggttgtgttcagttttctttttattgtggctgttttgtaggttttagtttgccgttgattcgtgagcctgctgttctgaatagattgcattgagaagggaaaaaatgggggcttgtgctccattttggcgattttcagctgcttcatatcccgatcttggagaaacaatgtcgaataattctctcttggaaactaaaagttcagcaattgtaggggaagacaccacatcttcaggggtatgccaatttcaagttttaattttgtctgtttggtgctttttagagactatccctgaacatttacaactttatgagcaaatccagggggatgtatatccagtggaaccgtctgacagctttaccgtaactcaagttctcgatgctcattggggtgtcctcaatgaggaagatgtaggtctgcttattttcaattccatctttttttttccggtcttatagagcgcacattaatttgtcgagtatttcagacaactggacttcgatcccacactctatctatggtagtaaatgactctcctggagttctcaacatcgtgacaggggtatttgctcgaaggggctataacattcaggtatttctgatgactttcttctctggtttgaccttgtttcccttaatcctagaatggattgaagaacaaatgattttctcgtctttggcggcagagtttggcagttgggcattcagaaattgaggggcgttcacgaattacaactgtggttcctggtactgatgaatccattagcaagttggtgcagcaactttacaagctaatagagctccacgaggtcagaaaacttcaccaacaagtgtcaatttttttgagtaaataatgtgttttgtgttttgatgtaatattctattgttttgaaacaaaacgcctctattaccaatctaatgtctcggagaaaaaagaactttttggtccctgtgctataaactttttggccatttggtccatgtggtatacacttgacctttttgctccctattctatgcaatatattaccttttt

SEQ ID NO: 1757 - DNA, 666 bp, Euphorbia heterophylla
ggggaatttggaatcccacattgcgtggctatgagcataaaatgcctcctacattgatgaacaatcctgaccccatagaatacctttttgggtaatatatggatgcttgcaggcttatatccctttcttcaaagcaatttaaaaactaatatgtatgcttttgttgctttaaatattggatcattatgtaattagctataaattccagattatgtggctgttggatgtcttcagagctaaagttgttgatacctcagagcatacaatgactattgaggtaattttaagtattacgtatcatatcctttatctgtacgtctaatggctgtgaagattcatgtaggattggatttaaaattgaaaggtcgaatatgggagtttttcctttggtttgtggctttgtgcctttcaacatcataactttttatgaggtttttattgttcatcaatttatcatatgattgcaatgggtcttaaggtgaaccttatcagaaaattgcttaagcaaaatatcttgcagtttataattgaactagttcacttgatggtttggagtcaaagggttattttgacttaaaaacagtaatggttcactcgaatccagcgacgtgcttctttctatttataggaatgtttattttttttggtagaggacgttttcaattc

SEQ ID NO: 1758 - DNA, 351 bp, Euphorbia heterophylla
attttgctttgaattctgtttccagcttaccggagatctcgacaagatggtcgcattgcaaaggttgttggaaccctatggcatttgcgaggtttgtggttaaaactgtcttttccttatgccataacatctttttaaaaattatatctttaattctttatctttttataggtggcaagaacagggcgaatagcattggttcgagagtcaggtgtggattctaattatctccgtggatactcgtttcctaaataataaataagccacacttgttatggtaatccccgagtttaaactggcttttggcttttgtatcagtgttaacagttgagtgctctagacacattgttt

SEQ ID NO: 1759 - DNA, 318 bp, Euphorbia heterophylla
gaaaaattgtttgtgctcaataggtggaagatatctctaaggaaccacatgtggaacgtgaactgatgcttataaaacttaatgtggatctagaaactcgtcccgaggtaatcttgtagtatttagtttgtctcttttctttcatttattattttgtaagccttagttttgttgtatgatattgacaatcttctgcaaatttctgcaacatattgcgaaaacaacactacaggctcttttgaatttgttatgcatgcaaaatgtttgatttggtctacctgcttccaatcaatagttaatatgcattcacaatttatg

SEQ ID NO: 1760 - DNA, 591 bp, Commelina diffusa
attaagtctacagctggatcattcaatgggaacacagaacaatcatctggaggagatgtttatccagtggaaccttacgaaggctttgttttcaatcaagttcttgatgctcattggggtgttctcgacgatgaagattcgagtggcctgcgttcacacacattgtccattgttgtaagtgatattcccggtgtcctcaacattgtaactggggtgtttgctcgtaggggctataacattcagagccttgctgttggcccagctgaaaaggaaaatgtctctcgtattactactgtagtcccgggaacagatgaatctatcggcaagctagttcagcacctttacaagcttatcgatgttcacgaggttcatgatataactcatttgccgttctctgaaagagagttgatgcttataaaagttgctgtgaacactgatgctagacgggatatcctagacattgctaatgttttccgggcaaaagctgttgatgtttctgatcatacagtcacacttgagcttactggagacttcgagaagttggttgcattacagaaactgttggagccttatggcatctgtgaggcggcg

SEQ ID NO: 1761 - DNA, 760 bp, Commelina diffusa
ctagaagtttataaacatcaccttggcaatttttatcgtgacaaacttcttgtttatttatttggttttgctttgattaagttggtattcagctaggagtaacagattgccaaattgtagaaatgcattttttttaataccaaacattggatatataggaaagttttgaatattctttcgttttaagttagtatgttggttctttctttattagagcccttttagtgcatttctctcgaaattcttatgagataattgagttctgtgtaactgtagaataaggagacacactatatctgtttttgttggagatgagagcggaatcataaatcggatagctggtgtgtttgcaagaaggggattcaacattgaatcacttgcagttggtttaaataaggacaaggcactatttactgtagttgtgtctgggactgagaaagtgttacagcaggttgtggagcagctaaataagctcattagtgttttgaaggtaagttgacaatttctgattattggttagagtgctctgtgttgatttataaggatgtatttatatttatttgcacatgctgtggattaggttgaggatttgtccaaggagcctcaggttgaacgagagttgatgcttataaaactcaacgttaacccagatgagcgccaagaggtatgtactattgtatatcactttacaatttggtatttcacttcttggagttctaaatttccggagaattggcgagtctagtaactattgggccaa

SEQ ID NO: 1762 - DNA, 374 bp, Commelina diffusa
ttataacactgttagttgccaaaacttctagaactaaactttttacctgctatatggattacactagtaaatgacataatgctatcgcttctggtaaaccgtctcgcaacttgtcaatcacttcatgaaatttgacaccttctattatgtagtatcaaccataattttgtggtaatattgcttctaatgtgttgcaggtggcgcgaactggccgagttgcactagttcgtgagtcgagagttgactctaaatatctgcgctatggctatgctcttccattatgagcaacttcaaaaactgcacataaccagtgagaccggtaaagataatgctccttcctcaactcatttcctaaataagtcaatcccgtcttt

SEQ ID NO: 1763 - DNA, 310 bp, Commelina diffusa
cactcataactttggattttgataatctgatttttctgtagattgctttgagacgtgagaagatgggcgcaactgcacccttttggcggttctcagctgcttcatatccagatcttgaagcctcagtgccagttagtactcctattaagtctacagctggatcattcaatgggaacacagaacaatcatctggagtaagtacttgattcatgtatgaatatataatgtaactggttgaaaatagaatttttattgattgttttgatgtgcgtgattctttttcaagcatctgagtttgtaagagtgagaa

SEQ ID NO: 1764 - DNA, 288 bp, Commelina diffusa
cattcatgtatttgccctactgtcaatttgcaggtcatggctctggtcgatatttttagggcaaaagtagttgacatttcagacgagactctgaccattgaggtcatatctatctaaaaatcgttttcttctaagaaagtgaacgttaattatcttagctctccagtcatgagtcaattcttcttcagctgagatcttggtcaacgtgcaggttacaggagatccagggaaaatggttgcagttcagaggatcatgaacaagtttggaaacaaaagttgaaatatgaa

SEQ ID NO: 1765 - DNA, 255 bp, Commelina diffusa
tcatcagtactctattcgtacatgcatctcttgtacactgcatatatcctttgattttcatttttattgctgctaggcttgattataatttagatccctcattttttgtggttaagggagatgtttatccagtggaaccttacgaaggctttgttttcaatcaagttcttgatgctcattggggtgttctcgacgatgaagatgtaagtttctgtactatcatgttttagttttctttcctttgctgtgaatgat

SEQ ID NO: 1766 - DNA, 210 bp, Commelina diffusa
agtcccgggaacagatgaatctatcggcaagctagttcagcacctttacaagcttatcgatgttcacgaggtcaattgagctttacattcagccatattcttctaccgattcttgtatctgaacatatgatgcattcaggttcatgatataactcatttgccgttctctgaaagagagttgatgcttataaaagttgctgtgaacactga

SEQ ID NO: 1767 - DNA, 569 bp, Digitaria sanguinalis
tgataaatcggattgcaggagtttttgcaaggaggggatataatatcgagtcccttgctgttggtttaaacaaggataaagctctttttactatagttgtatcgggaactgaaagagtgttggagcaagtcatgaaacaacttctaaagctcgttaatgttttaaaggttgaagatatatcaaaggagccacaagtagaacgtgagttgatgctcatcaagataaatgctgatccaagataccgtttagaggtcaagtggttagtggacatatttagagctagaattgttgatatttcagagcactctataactattgaggttactggtgacccagggaaaatggttgcggtgcaaagaaatttaagcaagtttgggatcaaagaagttgctaggaccgggaagattgccttgagaagagaaagaatgggtgaagatgctcctttctggcggttttcagcagcttcatatcctgaccttgaagaaatgaacaaaagaactcctcttcaagccaaaaagagaatggagtatcaggaatctgataagcctgctgggggagatgtttatcca

SEQ ID NO: 1768 - DNA, 5819 bp, Digitaria sanguinalis
gtgcttgccccccgtcgtcccgcgccagctgcgccgtcgccgcggcggcgtcgtcttcgggcgctggaggcggcgaggcggcctccgcggtcacggcggtcgcccccgcggccgccggcagggacaagtaagcgctctccctccccaccccgccgaaagtgtggcgtcgttttttataatttctcgcggggcgaggtggtggcgcggttactgttcgtggaccctcactccgcttttttcccaaatattttgtttttccctcctcatgacggggctggtcgggcttctggcggcaaatgcagggtgcggcgccacacgatttcggtgttcgtcggggacgagagcggcatgatcaaccggatcgccggggtcttcgccaggagagggtacaacattgagtccctcgccgtgggtctcaacaaggacaaggccctcttcaccattgtcgtctccgggactgataaagtgctcaaccaagtcatcgaacagctcaataagcttgtcaatgtccacagcgtgagttggccacactaaaatttcagcaaagtcgtgtgaattcgtacttgattacttgaatttcccctttaaattggtagctggtggcatttcactaatgcattgagatttttgttttatgtgttttaccttgctgaatgcccttcccccttttagtctgttaagataatttccacttttgtggagcatcttttgtatatatagagtagtacacaaaaccttttgcttttctgattcgtccataatccttgttttcttttttggtattctgttgcttttccccatagaatcactgcttgacagtcatgtcaacatcagggacatacttctttctaggtgatacctcaaatgtgtgttgatactatatatgcactgtcatacactttctttgggtgcacatacactcctttgtcttttctaggtgacgcctcaaatgtgcatgttattattctggctgtgtaatgcctcagaactcaacagtgacattgtcgtatcatgtttccttggttaatcatcgccaaaaaatgactttgttattttgaccatacagtagctaattagctctaatgctatcctgttgaaaagtctatctataaatatagagcacccttttggttacaagtgggatgtttctgaattttcttgtctctttgcagtgttgatctcttagggaaaagtctctgaaaaaaatactatgcagatattaaatagcttaggtaaatgtgcttcatggatcatcattactgcactgtttgtctcaagtctcaactctcaactaccgtttagatgggctttaatatttgtactattttatttttcaaaaaatatttactactattgatatgttgcaataagagtaataccagtaaatatttattattttttgtgtcgacccaattaattacaggtcgaagatctatctaaagaacctcaggttgaaagagagctgatgcttataaaattaaacgttgaacctgatcaacggcctgaggtatgttatggtgttcactaagtgtttgtaatccaaaagttgaatagcatcctgtatttatgatactaaattacatggtgagtcttactgcagtgcttcttttcatgactgacaggtcatggttttagttgatattttcagagcaaaagttgttgatatatctgataacacacttacaattgaggtaaaaaaaactcaaatctctaactggtgcacatatgttaattggtatcacttttcatgcgatgaactatgtgtttgatggttatttgaccactgttaggtagccggagatcctggaaaaattgctgcagtccagaggaacctaaggaaatttggaatcaaagaaatttgccgaacgggaaaggtaatttctgaatattctttccttacatggatatgaatattttttcgtagtactaatttttaatgctccaccttcttagattgctttgagacgtgaaaagattggtgcaactgcacgtttctggcgattttctgctgcttcttatccggaccttattgaggcactgcctaaacaaccacttacatctgtaaatgggagagttaatggcagtttcgagcaaccatccaatgctggggtatgttccctttgccttttccctttttattatgacctgctctgtttataattcacaacacttagttatggtgagaggatgcttctttatttcttgaacgatgcatataagcaatttgaggtggataaattaaataaaaacctgtaatgtcagtaataccttttcagctaaccaaatgtagttaataccttttcagctaaccaaatgtagttgaacttctatgttaagataaaagtgccaataattacctattgtgtttaagcaattatctgcaatgatgcagggatattagttcactaaacctaatgtgtttgaaaaataattaacttgtcttgtgaggggtttgggtcacttcaccaaacatttttgccagtgcatgatactacttttagaagtcagagtgcactataacagtgcttttatgagttataaagcagtaattgaaggtacatatttcatatttgcatgcataaacagctctcctaatggacgagtcattacacaactggtatgtcaaacttgtgcatatcttctattatgctaatgagggaacatattgttgggtgttgcccaccatagtgcacaaacttacataaacagcattcctaatgggtgaatcatgcagtcctagccatatttcacacttgccgtgaaacttggactaatgctaaattgctaatatcattaatgaaattgtgcagccattgaatttgtgtgatgcagtattacaatctagagacttctataacatgtgatgttttgacctttgaactgttcagggtgatgtttatcctgtggaaccttatgagagctcatcactgaaccaagtacttgatgcccattggggtgttcttgatgatgatgatgtaagtttatagatttccatcgtgggattgtggttagtgctatatggactgtattgttgtaagcataattgcaccctgaatctaattctaatgtgactggagtgagttctcatttaatactttcataatgtttgcaagaagtcaattgtaggccgcctatataactttaagcaatggtactgcctaatctgcatggtactaaactggtactgattttgtttgttacagtcaactggactacgctcacataccctctccatccttgtgaacgattgtcctggtgtcctcaacattgtcacaggggtctttgctcgcaggggctacaatatacaggttttccttattgaaaaactatctttcttcttgtgaaatatagtgcctgggtagttattaatgacagttacttctcatcagagccttgctgttggcccagctgagaaggaaggcatttcacgcattacaactgttgttcctggtactgatgaatccattgagaagttagttcagcagctttacaagcttattgatgtgcatgaggtaagcagcatgtgactttatgaaactcattttttattgcaattttattatttaacataagcatctaaattgtgcaggttcatgacatcactcactcacctttttctgaaagggagctgatgcttattaaggtttctgtaaacactgctgctcggagggaaatcctagatattgctgaaatcttccgagcaaaacctgttgatgtttctgaccacacagttacactacaggttagcttcctaacaattttgtctctcctggatttacttcagtgtctgtccgaacactgatcatagcagagccagttgtgatacaagttttgtgcacaatcaaaaaattagatcatggtgttcttttacttttttcagcatagcactcttgtagtaacagtaacattaccatataaaaacactgtgatgccaatgacattactattcttcaccctgctttatctcactccttccaagctattggcgtattgcaaaactcttacataatggagttcttattggtaatttgcagctcactggtgatcttaacaagatggttgcattgcaacggttattggagccttatggcatctgtgaagtatgtgtgcttcttatacagtcactgtctgttactttattgtttttcttatgtagttattatgaaacagacattcctttcacagtttcactaactagttgtgaaacataatctaactactgtaataatgtcgatcaaagcattatgcacaacattgcacatggctagcccttaggccttagcagttagagaaaaaggaaaatcttgtagcagctactaaaggattcccaatcagttgcacacctgttttatctttaggcctcctccaatggaccgactcttagctagctcataaatattttattcgatgaacaatgctcgctagctcttagttaagagatcagctcttagcccaaccccctcacatgcatgtttttccaagctcttgttctactgtgtcgagctctaagagctagctagttggctcttgccattaaaggaggccttggattgatacatttgctttccttttctctgcaaagcaattgctctttcctcaccgttgtgttgcactcatgacaggttgccagaacaggtcgtgtggctctggtccgcgaatccggagtggattccacgtacctccggggctaccccctcccattgtagcctggcgtttgtgatgatggcccaggaaaggcgtgcctggttgctagagcagaatgtgtaggcgtcccttgttcggttgtgtgtatttgctggacttgtttgtttcatgttcgtcgactccttgattcgcttgcttaataatatgctccttggtggatgcaagctgaggttgcatttgtatcccgttgacagtaataataagatgtatgtgcatcctcgtagttcagttgccagtcttcagttgggagagatgtagccagccaccgtccaaaattaactggcccgcggcccgcaccttcctattattccttctgtctggtgtttttagccgggagaaattgtacatctggagaagggacatggctgctccgggctctggctagcagcgtgtgcagccaggaagctgttggtaagggcgtccaccatgggaggcaaaaccagtccatagtgactaaaatatttcattcaacctagctgacacattgtggaagtagtccatatagtagtccatagtaaaaggtacctataagcttatgggctgcccatatgaaataaaaaaaaacaatttctctctcacatacctctcatctctcttccttttcctctcaccactactgcctacttttggatgaccattgtgaagtttgcaatagttatgaagtttacaatagttatagagcactttcgtaaggttccaccactatgaattacttagtccgaaagaggctgcggcatgccgccgattcgtttttgaccgttctatagactgcgtcttgcgagtctccatggcccgagacctctgtgtggccaatagatcgatgggcatggggctggctcctggcgtacacgcaacgactgcatttgcggagacgcggcgcatgcgtcgtgcgtgatcacgacgagaaaggagacgaaacgaacgagagcgtgggccgagagacttcgcccgccatcgcttttgggcttaaaaggaagagcccagtggcccactacagatcggacgatgaggacgacggcgtggcatggcatccgcccatccggtattccggcaggaaggtacgggaagaatcggactctcgccttcgacgaccagggcgggcgccgatccgaatc

SEQ ID NO: 1769 - DNA, 5263 bp, Digitaria sanguinalis
ttttaatacattatgatgtggcaaatttttaaatctttggtattcacttcagaaaaataatgtgtaagctgccaaaaatagggaatgtttctattgtacattgttaacatgtgttagcaactgtcatcagtgatcctgttcgaaaacatgtggcaatcagttttattgccttagtggggatctttatgttggagaaagtattttattttagctcatataaatcataaaaagtgagaaactttcaaaatcaggtaactgtcaggacaaaaaacattttatttttttatattaaaaacaagcaatcttccatatatgttgattttgtactaaggttgtgaaccaaaacacaacttcaaatctgtccacattatcaggttcgtttttgtcaatataaaagtaactattctttttgtcacatactatgccctgtagtggtgtccaggaacttagggaatcagtaattactgcatgtccatacagcaaagtagcattcttattttgtaagatctgtaaatcgttccatactgatactgtagcaaaacgttattaattgttcccctagtaagtaattattaacactttccctttttaatttatagggttgtaaagcgtcacacactatcagtttttgttggtgatgaaagtgggatgatcaatcgaattgctggggtttttgctagaagaggatataacatcgagtcattggctgttgggctaaacaaggataaagcattatttacaatagtagtgtcaggaacagacaaagtattgaaccaagttgtagagcaactaaacaaacttgttaatgttataaaggtcagtattttttcctcttaacatgtggcttacaaaaatgattagtatgtcacagaagtcatcactctttgtcttgtactgagactgttgaacatagtatcttatattcacatcttaacatttggattaataaacaggttgttgacttatcaaatgtaccacaagttgaaagagaactgatgcttataaaaataaatgcggagcgagagaagctgcctgaggtataatcatacatatctttcaaaacgtatctgttctgaccttgtaaccttaagaatgaatattggatattacgtttgtagaaagaaatatataaattgataacaaagatatcagaaatcaggtctgttggtgcaaactagcacattaaacttcattgttggggtaacatctatagttgtgaatgcagataattgttttggctcgcattttcaaagcagaagtggttgatctttcagacgatacactaactttggaggtaatgtcgttgttgtgccttgactcaaagataactcaatttatcgttcttatggttctttcttgtggatatgttcaaggtaactggagatccaggaaagatggctgcactacaaaagactctgagcaaatatgggatcatagaaattgctagaactggcaaggtcattattgttcagaaaatagtgaaaatttattgtgatcttgttctacactatatctaacgagccttagtgatgttatagatagctttgcgccgtgaaagaatgggagaatctgctccattttgggggttctctgcagcatcttatcctgatctcgaagtgacaataccttcaaattctcgtctaagcactggaatggatgccgtgagtcagaatcccaatgaatcttcaggggtaagaaaccacaattgtccttttatctgatcaatggatgtatggcgtgttctttagtttctaagcaccgcagtgctgttttgtaattgtaactgatatttccctatttgtttgcttgtctgcatcgagtagatttgcactcatgctttctgttgactagtttcggatgaacaaattgttctttctgaattcgtttacattgctgttcattctgttcaattgggtactaaatacctgtctatcttcatgaagaaacagccttatggctaattggctattgatagttttgcaatattggtcccttccaaggtgaacctagtatgtgtgtacttgtatatgacatcacttgcatatttttatattgaacatatctgacacattccagtgctcactcaatacttaatttgtcgtttgaactcttaagtatatataaaatgcttgctcatcttttgttattggagtgttgtattttgaatgcttgctcatcttttatataaaatgcttgctcatcttttatttaaaatgcttgttcatattagtttcaattttgaatgattgttttatacatgcttttcttcttctacccagggcgatgtctatccagtggaatcgtatgaaagtttttcagcaaatcaaattcttgatgctcattggggtattatgacagatggtgatgtaagatcttgtatattctaatcactttgaactatttgatggtagctagagatgatttgcatctagttctactcatcctttcacaagaagttattgtgttgctaatagttaacaatcaagactgcaagatccaaattaaactctagtttgtataactaaattatggttcacagtgagaagtacaaaccataccatacagcagttaaatgtacctaattatgaattaatcgaggaatttcttgttgcttcagtcaatagggttttgttcacatactttatcgattctcgtgaatgattttcctggagttctcaatgttgtgacaggtgttttctcccgaaggggctacaatattcaggttcttcaaaacccatttagtatattgtgctccctttaattagatcactacaggatccagtccttgctaaacagtaaccatcactgtcacagagtcttgctgttggcccagctgaaaaagaaggaacatctcgcatcactactgttgttcctggaactgacgaatctattgccaagctaatacatcaactgtacaagctgattgatgttcttgaggtcaataatttgcagtttccatgactgttatagaagtaatgcagttggtataattgttatagaagtagtgtggctcaaattattttttggtttctcaggtcaaggattttactcatttaccatttgctgctagagagttaatgatcataaaggttgctgcaaatgctgcagctcgaagggatgtcctagatattgctcagatttttgaggccccaaaagttgacatatcagaccacacaattacactacaggtaactgttattgaaataacttttatttaaatatacctcatataggactataagattcttctgaaagtatgatagtttaatcatctttatgtacacaataacgacttcatattgttcatatatggtattttttaatgcgtattgtagtattggtccaaccatgaagggactaatatattgatgttaataggccaaatatgtcaggtattagcatattttagcaattggcaatctttgaataaagagttatttgaaattcgtaaattttggactcatcattttcttttctactttgcctttgactaatgatcttttctacctgcactgacttctttaatcaatcgtgtttcattagccgtgcctagtgagtaataatcttgttggtctgtgcagcttaccggagacattgacagaatggttagattgcaaaagatggtagagcaatatggcatctgtgaggtttgtgttgactatgttgcttctaatttcactgatatgtctggcattaccttaccatttcatgcatgatgattttctttttctcacaagttattaattgccagtgttacttcagcaacctcaaggagacacttgaaatatatttatgtaattgtctttcctctttgcctatgcctactgcaggttgcacgaactggccgggttgctctgctccgtgagtctggagtcgactccaagtacctccgtggattcgagctgccgctgtagttatccattcactgacataccactacggttttactccgtgcttccatttggtcttctgagcatatgatgcagcttttcatgtttccctttggaccaacagtagaagaaatataactcaaaaccaaaggttgggaatcataggcggaatattctgtacaatcgtgttaattggctaaacagtgataggttatatgggttgctatgggcttatgctgtaagtttcttgattttgtaagtagcactcatttgctcagttaaaaattgaaatctcacggagcaaacgggaggtttgtggaatcataaatgaacctaccaagcataacaggtgggttggcattggcacagctagcgcaaccgatcaaatgagagatcagattgtgcgagttttattgatatagcagaaaaagctaagactattacactgggaggccatataggtggaaagaaatgtataattttgctccaaataaacaggtataatttaatttacctgtcaccttttcaaatatactcggcacatttactgtattctgacgattcaagaatctacgctcgttgtatcaatatctttttgctatttttggactaggtcgagctagcggaagatttttctctgggctgaatgttccatcccaagcccgacggaccttctttaatttgtgtttcgtgtcagaccatgatttgggtttattggggtgggattcctacccatgatttgggtttatcactttcttgttcggttggagggtatccaatacaggggctgatttaatccctgccggtattgggtggatccctgagctgccacccaatccctgtggtgtttcattccctgttagcactaatcccctctcctcccttttcttgttcggttacccaccatggatcagaagacgcaacaagtgatggtaacaggtagaaacatacatatccctttcctggacagaagatcatacgcaatatggcaagctcatacacaataagaagactacctggtcaattgtttcctggacagaagtgcatacataactccaccaaagactgacaacagggtaatcatgaccatcaagtttgcagactaaccaacaatcgttaagtaccaagcaatctatgatcatggaactatagcattgtttgcccctaattctaaccagccaaaaatccaagactactcaactgttagaacaccgataataagctggagcaatgagtatcgataggctccttaacaacatataatcttaatgcttaggctgcatattcttcttggcaccaaactttgtaggggattcagtgcactgagctcagtctaggaatagccaacattgtcagaccaagcttgtagtagt

SEQ ID NO: 1770 - DNA, 4483 bp, Digitaria sanguinalis
ataaatataaagggccgtggccgactgaggacgaacaactccaaacgaatatttgcatattacttttatctctcaaaccctaacttttccaatcttttgctttccttcttcgtctccacggtgattcagaaggttctaagtggccctgtcaaccttagaacaaccctaggttcgttgcctccgacgaggtctctcccgaggcggcgatcgtaggcttttgcagcgacctagctacaggcggtctaaccggctgcgcagagaggcgccggcgaggtgatttcaactttcgcgcgatccagcgcacgcgtttgttgaccgaaaaggcgtcaacactttctgattcttagatgaaataaagcctgcaaatgaactttttttttcagtccaacaattcatttcaacagaagtaagatcggtagttgacagtacagacacagaagacttgaattgaaactaaggttcctgacgtgcaaattatatatggagacctgaatggcaacaccatttccttgtttgccgatttcagaacatgaatagccatcgggatgtctgaatgattcagtttcatgttcaacaaacacatgtctatttggttaacttacgatgtatgtctattcagaacatggcaatatcagaacatgaatttgccggcgtgcactctccagtccgtccggggcgtccacctccttagcttgccggcaaagggcaaagttgcctccacgccagccacactagagtgtccaccaaaacaggaagaagccgccggcggacttccattcagacacgcctggggacttgaggtgctcatcgagggagatgccgaagagagatgacggagacactgagaagaaaccgccgtccgaactaaacggatcggaagttgaacttggatgggcaagggtagggctatagggttggatccattcgggtcacccataacaaagtaattaaaaaataattatttaattagatgggttgctttaagactcgtctcctaaaataaaagtggagtatcggattagttctctattataattagtagcaaattaaatatatatgtgcattgctgcaggctaaagaaatgtatcactactacacaacccctttcgcagccggttttgccaaccgtttgattccaccaaccggctatgattagggtacccaggattttagttccacatccaaacaattgaaaaaaatttactacccgagcaacatcaacctatggcgaagtgttattaatcattcccctagtaagttattattaacagtttttattgcacttccattgacatgcctggacaaattttcctttttaatttgtagggttattaagcatcacacactatcagtttttgttggtgatcaaagtaggatgatcaatcgaattgctgtggtttttggtagaagaggatataacatcgagccattggctgttgggctaaactaggataaagtattatttacaaaagtagtgtcaggaatagacaaattattgaaccaagttgtagagcaactaaacaaacttgttattgttataaaggtccgtatttttccctctaacatgtgacttacaaaaatgattagtacgtcacagaagtcatcactctgtcttgtcctgagtctgttcaacatggtatctgatattcacatgttaacatttggattgataagcaggttgttgttatgttcggcaagatgtatcagaggaagaagtgtggctgaggaagaacgattgacaaaaacgtgaagcactgcccgtcaaccgacaacgtacggcgacatatgctacagtaggtgcgacaacggcgagacacgctatagtaggcaggtgcgcaactactgtaggccaacgctcccacgatgtggagtagttcagattacttttcctatactttagtagtaattgccagtattgtaatttggatatatgtctctgttcggaattggaaagagttatgtttagagatcaatatgatctctagacgtcctgagctgctgtttcttcgtctcactcttgctcccaccggccgttaggacggcgtctcgtcctcgccgccggcgtgaaccctcacctcgcctgccaacttcctattcatacgcactccaagggattagcattgccaacaatttggtatcagcaagcagctgtgtccagggattgacgactgggaattccatccacaccgccgccatgtcctccactcccgtgtccaccacagcaccgccgccttccactaccgcaccaccactctcatccaccaacctcgccaccactactgttccagtcgccaccatcgacaccctaacgacggcgatctacagcttgcaacgtcaaataggagaattcgccaaccgtctctctatggttgaacatcgtcctcatccaccggaggccggaccatcggcatcactgccacatgggttgccgggctatgacggcatcccacatcatcatccataatcgtccatacctccacaaccatcgaactggttcccatcactcagattgccttttcaccctccccttcaccacttactccactgcatgagagattctacatgatggaaagagatgcaggtggcaaatgaagcattattgcaaaaatataatgatgtcaatattctagtaatgattaatgaaactcttattgcaatgggaatcttgatgatacagtttttccaccaccaaagatacatgtcatgctttattaatactccttattgtggccatgcacttcatcaggaccttagctcgatgaagggcgctgtgtgcagtgtgtcttcaaatttagcagtgcatttacgtcgtatacactcctctctgctgctgtaagtagttcgacaaggcactgcatcgttccctcgccgccggactgcaatgtcctcactgaccggcaacagctatcatcataggttgggagtatacgggagggatttgagcgtaggatgaagcggttacagacattacggacaataaagtttttctgtctctctgtacatggttgtggcttgtgacaaaaccaacatccaccactcacaggaacaagagaaactgtagcaaacactagtaggaggagaatagctgctgctttcccagttgacatcttaatgcccaatgttatgtctactagatattgctaagaaaatgttatgactagatattgacctcctgcgttcatacgtgctcctatatataggaggcaaagcatgcaggttggtatacaccgggtttaatgcgcttttatccttgataccatattacgtgatctagatatggtatcatttatgaagcgatccttagagatattaatgcctattgtagagttccatgttatcctcttgtattcatattttatgaccataaaataactagaattatttgaatatctcatcaggataaataatcagtttattaattcatgccttacctttgttttgtaaccacagcaggtcccgtctcccggattgtcttcttttgcatgcacgcatgcattcagggccgctgacacctcgaacgtttccatccgtatatgcatgccatcgcccgggcgaccatgtaactcagctctgcgccgaccaatcagtgcacctgcctcttgacagcctcgccgccgacgagccgccgtgcgcgcgaaggtcgccgcgctctcgcagtacgtcgccacgccaacaagttcaagaaggacgggaccggcggcggcggctacaccaccgccaccgtcggtacgtacggacggtagccacgtcagcacatccatctgcttgatcatgcacaaaacctgcatatacctataatttggaaggtgctaaaataatacaattatgtgtgcagaagagtggatttaaatcttcaagcaacatgcaacaaatgtgagaaagaagagtgcttttaaatcttcaatcaacatgcgacaaattttacccttatgaaagctgcgggagtacccgccgagtgcagccgtccacgacagtgaaaaaaaaagttaccgccggatctgagcctaacagccggtaattctgtctccttttgttgatgcaacccgttgaagccccacccgtcggtgcaccgattagattccaccgctactcttcaacttttcattattcatcaaactttccattattcatccactcacacctatcacgatctatagtgttttctctcatctacagtgtattttcacccagtctaaacacacccttgaaaacacacccggtgtggcctctccccattcacccagaagtgttaaacacacccttgaaaacacacccggtgtggcctctccccgttcacacagaagtgtcccgaactgccacggggagccactggcgtgggcggtaaaaaaagagaaaaaaatctacccctcctttttttgccttcctcgccacctcggccgtggccgtcgtgatcgtccgtagcttccctccgtggccgtcagcaaggtacgctccctgcacttcttcttttctccatgtactc

SEQ ID NO: 1771 - DNA, 3928 bp, Digitaria sanguinalis
tctttagtttctcagcactgcaataatgctttgtaattgtaactgatattttcctagttgtttgcttgtttgcattgagtagatttgcactcatgctttctgttgactagtttcagatgaacaaattttctttccgaattggtttaatttgctgttcattccgttccattgggtactgaatacctgtccatcgtcatgaagaaacagccttatggctaattggctattgatagttttgcaacattggtccttccaaggtgaacctagtatgtgtgtacttgtatatgacatcacttgcatatttttatattgaacatatctgacacattccagtgctcactcaatacttaatttgtcgtttgaactcttaaatatatataaatgctcgcatatcctttttttttgttgccgtgttgtattttgaaaatacttttatcatcttcatgatattagttccaattttgaatgatggttttatatgtgcttttcttctacccagggtgatgtctatccagtggaatcttatgaaagtttttcagcaaatcaagttcttgatgctcattggggtattatgactgatggtgatgtaagatcttgtatattctaatcactttgaactatttgatggtagctagagatgatttgcatctagttctactcatcctttcacaagaaattattgttgctaatagttaacaatcaagactgcaagatccaaattaaactctagtttgtataactaaattatggttcacagtgagaagtacaaaccataccatacagcagttaaatgtacctagtcatgaactaatctagaatttcttgttgcttcagtctacagggttttgttcacatactttatcgattcttgtgaatgatttccctggagttctcaatgttgtgacaggtgttttttcccgaaggggctacaatattcaggttcttcaaaacccatttagtatattgtgctccctttaattagatcactacaggatccagtccttgctaaacagtaaccatcactgtcacagagtcttgctgttggcccagctgaaaaagaaggaacatctcgcatcactactgttgttcctggaactgacgaatctattgccaagctaatacatcaactgtacaagctgattgatgttcttgaggtcaataatttgcagtttccatgactgttatagaagtaatgcagttggtataattgttatagaagtagtgtggctcaaattattttttggtttctcaggtcaaggattttactcatttaccatttgctgctagagttaatgatcataaaggttgctgcaaatgctgcagctagaagggatgtcctagatattgctcagatttttgaggccccaaaagttgacatatcagaccacacaattacactacaggtaaactgttattgaaaaacttttatttaaatatacctcatataggactgtaagattcttctgaaagtatgatattgaagtactggtccaaccatgaagggactaatatattgatgttaataggtcaaataatgtcaggtattagcatattttagcaattggcaatcgttgaagaaagagttatttgaaatttgtaatttttggactcagtcaatcattttctttctgctttgcttttgactaatgatcattcatacctgcactgacttttttaatcaatcatgtttcattagtactgtgcctagtgagctatatcttgttgtcttgtgcagcttaccggagacattgacagaatggttagattgcaaaaaatggtagagcaatacggcatctgtgaggtttgtgctgactatggagcttctaattcactgatatgtctgtcattaccttaccatttcatgcatgatgattttgtttttctcacaagttattaattgccaatgttaattgtacttcagcaacctcaaggagacgcttgaaatatatttatgtaattctgtctcttttcttatgcctactacaggttgcacgaactggccgggttgctctgctccgtgagtctggagtggactccaagtacctccgtggattcgacctcccgctccccctgtagttctccattcactgacataccactctacggttttacgctgtggttccatttggtcttttgagcatgatgcagcgtttaatgtttcctttgggaccaacagtattagaaagataactcaaaaccaaagagtgagaatcataggaagaatattctgtgcaatcgtgttaattggctgcagagataggttatctggattgctatgggcttatgctgtaagtttcttgattatgtaagtagtaaagtagcactcatttgctctgaaagaaatggaaatctcacggagcaaacgggaggtttgtggaatcagaaatgaccctaccaagcataacaggtcggttggcattggcacagctaacaaaaccgatcaaatgagagataagatagtgcaagttttattgatatagaggaaaaagaatacaagactagcactgaggctataggtaggaaaaaactacataggtataattttattccaaatagacaggtataattttacccttcaccttttcaaatatccttggcatactgtattcctcacgattccaagaatctacgcccgttttattcatgttcgcctaaatggcggtgtgttcggtgtgtacgttttattcagtgttcgcctaaatggccgtgtattcggcgtgtacacagtacacggcggttaattgtgcaatttagggtataaacattagtttacatggtttgcttgtttacacggatttacacggtccaaacagcctacacggcacattaaaaacacggttttgcatggcatgttggcattttcttcttcgtttaggcgatggagatccaagaagattccaatctgaaccagaagatgtcctaaccagcctaatctgaacatgcttgttagtcctatgttaatctatccgttgtaatttgtggtagcatatgacttatgagttgtatttcctagataatggatgacagctatatttaattacctatcactttttaattggttaagtgaataaattgtctaaccatgagattatatgtatatttttctaatatagcacaaaaacgtgtaatccataaattccgtctaaacggtctaaacgctacacgacaccttttcaattgtttagtgtttacggtttaagctaacactggttttatcaatgtctttttgctatttttggactaggtcgaggtagccgaaggtttcttgtttctctggctgaaagttcaatcgcaagcccgacggactgactttgtgtttcgtgtcggcccatgatttgggtttatcgaggttgggaggtgcctgctactccctccctccctcctgcaagggattatagcctagcccaacgagtcagaaagaactatatcaaataattcaatgaaccgatgttggcccacaaaaagactaaatatataagctgctgctatttgcaattttgataaggctttcatcccgggctggacctgtgcgcaggtgttaggctagctaaagctaggttgatttttagtgtttttagctcatgcaggacaacttattttggaggaacaactccacgttgctgctacaaatagatagataggtagatatggcacatgtattggaggaacctctccaatgtgctaataggtagaaacagcacaaagtgtttatgaaccacttcaacgtgttgagctagatatcattctagagatgaagatagaccaaaaggtcggaatccgaatccacggatcacatgagcttaatccaaagcccttaggatacaagatttagtccaagatctaaacggtagaacaacatgttctattcataaggtagtgggtacatcgaaaccaccttacaaactttggcttgcctctatttataggc

SEQ ID NO: 1772 - DNA, 579 bp, Digitaria sanguinalis
ttatatatctccctgagtgcctttcaatagttatagttggattgactaataagtaataattcatctatgaatgacccaaataaaggttaccagtcaacaaattagtactcacccttacaaagttgttataaatatcgttaatcacctcaatccttccagaagtaactcctgtaaaactctgtctaaccataactgttgtcaggcgatttcccacaaaagaatttgcgaaaatgttgataaagaaaccagagcgaattcctagtctcctatcccagtatttctgaactgacttggaaggtttgcgctggcggtggctgatgccataacaaagatggggtccggagatgttaattttagtcttgttttattaattggaatttcatttcatgatccaggttagagatattacacacctgccatttgctgagcgagaattgatgctgataaaggtcgctgtgaatactactgcacggcgggatgtccttgacattgccagcatattcagagctaaggcagttgatgtctcggatcataccattactcttgaggtagaatgtaggagtcattcattataccatt

SEQ ID NO: 1773 - DNA, 402 bp, Digitaria sanguinalis
gtatctacccgagattccgtcaagagaagtatcaatggtgacactagcacatcatcaggggtgtgtaaacttccatttattaagattaagcataagatcatatcgttcttgccagaataagttcggtatagttcacttcaatccatttttgcatgagtaaatttacaatgcagcacacttcggttccacccatcatagccattttgcttataaagattgatgaaatgctttcttagtctaaagggggatgtttatccagtggagccatacgatgactttatggtgcatcaagtacttgatgcgcattggggtgtcctcaatgatgaagatgtaagcattcttttatccgttcccaaatctttcgagcttcctgctgtactctgaaatcccgcccaggcgcgg

SEQ ID NO: 1774 - DNA, 227 bp, Digitaria sanguinalis
tatactgtgttcctgccaaactgattcatggctgaatgcattcagacaagtggggtccgttcacatactctatcgatgcttgtcaatgacaagccaggagttctaaatgttgttacgggggttttcgctcgaagaggttacaacattcaggtatgcaatcactatctagccttgtggtctggcgctgggtcctttgttgttgttgttgaggtttgtgtgttgttgtc

SEQ ID NO: 1775 - DNA, 12412 bp, Kochia scoparia
tagtggaagagatgaaatgtctagttatggaattatggttgatgattttggtttctggtttggtaaacggaggtttaattctctggctagttttgcattgatgaacaaagtcattgcccaagccaccaactgttttcatttgaaggaggctccccgactcatgtatttttcagccatgaatctcgatcaagtgattaatttgatcttaggtcattcatattgctcttgttgttcgcatggtttttttacaactttctagcattcagactatggtaatttcttttttcatgccaacacttccatcatttgtcataacctattgcttgacgaagattctgtgtaatgacatgtgcttgagtttccacttattcacaacaaccaagttgtgagaagttgatgatttatagggcgtgtttgacaatagtagctggcactgggcgtttagttgtggaaatagttggtagtgctaacattggtagttagcggtagtagtagatgttaagtgtcaacaagggattatacaatctaataatttggcaatggtaacagttgtatatataataaaagaaaaatggtataagaagaaaaaattgtacccgctacatgacaaatgttagtcctagtgttgagcaatattctctttaagcacttacctctatccgaaacattattttgccaaaccataatttaaattaccaagtagtgttttgatctagtcataccactaaatgctatcttatactcctacgccgatcacgcccatagcataggtgaaactatataaaaaaaaatgctaatgaaatgcccctatcccaaaacaaaataaatgcattgtaacccaagtattagtagatttgatcatggtatttggtcgattttgattaatggctgtagttcccaagtgcaataggaatcttctttggtgaatgtacccacgaccctgaaaagccttgaattttgcatttattgtaatcaatcaatcaatcaaagccttattatcatatgtggggtcgaacatgaaccaaaagtgattattccaggaggtcatccatatagattttcctcctctattctctacgatcgagagcctcactcttgcaaatccaactgtttcaaatcctttctaactcctccactttatggtaatcattgtataaaaaaacaaaaaacaaaaaacaaagaaagaaaaagaaagaaagaaaagaaaggagatcaaagggcataatagttaattatgatgccaagtaaaaaattagtctgggtcttgggaaatagtgatgtgacaatgaagaggttaacggatgatggtttattccactggaatttgttctaattgttcgtctttcaaaccttgtttgagttatttagttgccttttggtgttgttcaaatcaatttattatcgtgaatttgtgatgactgagataggtgttttcacaacgtatttggtctagaactagtcacaactcgcattttgtttgtggtatgtgtagtagtgacggtgtttccacgggagaaacagagtgatgctgcgtttgcatgcattattgtttttggtatcatctttgtttctgattcaatgtttggaattgaaatggagattacttcctagttgtttaaatatcttatttgtgattcaggaagttgagtttggtttaaaatgtatgtatctttggattttagaaaaagccaagggaggtcaaatgcccaaatgtgacttgtgatgaagggaattaaaagagatatggagaaagtaggatcatagagctctggatagaggtgaatggaggaagaggtccttattgatgattgtaaaatataaattcttgattcatgcaaccgttattcgttaaacaatatcaaagctttgttataattcttaaggctgtagtgtttccttgtagaaatgctgtaatctgcaaattttgcacatttaatgaattatatgatgggttatctttaaattgtctataatcttaattgtggttgtttaaaatgtctaagggcaagacgacataccatttcagtatttgttggggatgagagtggaatgataaatcgaattgctggggtcttcgctagaaggggttataatattgaatctcttgctgttggattgaacaaggacaaagctctctttacaattgttgtctctggaactgataaggttttgcagcaagtgatggaacaacttcagaagcttgtaaatgttctgaaggttgtcttttgctttagatgaaaattaattttgcattgatgttttccacgaagtattatctgagatctattctcatggccttttatttatgtttaggttgtagatttatccaaggagcctcaggtagaacgtgaattaatgcttgttaaagttggagctgatcagagtaaacgtgctgaggtatcattcacaatatgtttcggttccccaaaagtggaagctagtaatattattcttgcttgtcagaaaatttcgtttagttgtagctaattattttgaaatagtaaatttgttgtatgctaatcttccgccatcattcatcctgattgaactttactgtacaagtatctttaaatctttgagctgagtgaattctaatttataatgtttgctacttatataataacttttgttatttccttttgatactgcagttaatgtggttggtggacatcttccgtgctaaaattgtggatatttcagaagaaaatcttacgatggaggtatcactggaaacattatgcagattaagacaaatttctaaagaactatgtaatcatcctaacgaggattgacttccaagaatttaacacatgttatctgctttatttttcagtagtctttgatgctttaggtgcatttgaataatttctgttttaatatatattctaataatgttatagttactgtatgtgattctatgatccaggagatgtaacttaagtattttgttttgcttggtgcatacccatttacttcctggaaatatttcatgtagcttgtgtcatttatatacttgatcaaacaaggtccgaaaggaagtcatttgagcaacaacttttaacaaccaaggtcccttttttttttttttttttttctcattctaaaactctaatctcacaaactgcaatcttttaggaacaaagggagacctcctccacctaatatttcttttaaaccaaagacattttaggataaattgagaagcttttagaacaagaggaaatcagcaacacttaatgttctttcttggtcatgatggacatgaatgaggaatctttggatgatgctcccgtagcttttagtccttatttaactttatgtattttgggttgttttgagtctttgtctctcccttgggttttgttgtgttttttagcttaatggtccttttgctttttaattggctctctttgacttttgttggttttgtcgtggggttccttggggctcttctccccttgtgttcccttgtactcttttacttttggtaatgaatttctttatataccaattataatagtaataataataataaagaaccagtgacaataggtttagtcaccaaaagtttttagacttgcaacatagaatattatacacattaaaacacaatagtaaaactaaaactaaaacgcctaccaattggtggtttcttctcttttgagaacttttccagagcatcccaatctcttattgtagcaagtgcaaacaccttaagccaataccatcttttctcagaaacctggaaaagagtggcaatgtcaagtagacaatttaaacaaagtagcaactcgtcgacaaaagaaataaggattgaacgaacatgtatcttgttgcttataaaaagaagaaacaaattacataccttgaattcatttttcaccctcaaagcagctcgatgatttccgagtacaatgcatgtgcgaatcgtgtcactgatgcttgaatctacaaagattgcttgctttgtggatacctcaagctcatgctgcattctattatggtagaaaaattaaattttaaacacacatgaacaagaaaattcataaactaaaagcttatatttaatcttgttcagttatgcattaagtgaaaatatcacccccacaggatacaaggaacaaaaacaactgaacatgagagataaagggctgataattgcgagatgacaataaagatgacaataaaagagcaagataaataatcttgttccccacaggatacaaggaacaaaaactattgcgagatgacaataaaagagctcttttattgtcatcctttatcttgctctttttctgcgttcagcaagttttttccatcgttatttgagatggatgtgtgggaatactatgagagatagaatcaaaaatgaagttatctatgggaaagttggtgttgcagatattgcaagtaaagtaagatgaaggaaaaccgtttgcattggtttggtcatgtaagacggagatctcaagaggcaccggtgcaaagagtagaaaactgggatcagagtatttttaaatgaggtagagggagaccgagaatgacttggtgagaaggagttaaaagggatctacaagcgaatgaggctcttgattgtagggggtggaggaggaaaatatttgttgatgacttccctaaatactcacttttggttcatgttagtcgaccccacttatgggactaaggctttgattgattgattgacttgtcgtgcactgtttatttttttataaaaaattcttttcttttattacatgttttaaaaattattcgacaaatcctttggtgaattacataagaatttatgctattatcttggtgtatctcttatgtaaataattttccatgttatagctatgttttttgatcagctttctctatgtcgcacaaggtagaaccaaaccaagagttccgaggattggtgtgtgaaggagctaatgttctcccttccaagtttgtagaggattcacttcgtgatggatatggtaggattctctctctctttgatttttatattggaatacctgacccttctctccattaaattaaattttgtcatcaagctgtgcaggaaaagttgtcaatattaggcatttggataaagtaattgactccatcaatgggtggtacatggagcgaggcctctttggcatggttaatatctcatttctttctgttgtttaagacttctggatcagcctctttcattgcctatccttattttgttaaggcttgagcgcggcaatgttttggagcaggagattcaatgttttattcctacaggtttcaggtgttgagatcctttcaggaggtatactaaggttacaaattgctgaagctgaggtcaatgatgtttcaattcgtttccttgatcggaagacgtaagtgataattttcatatttggtactaaaacgagtgaaaaaggaacagtggagtctcgatcatctcatagcgtttgtttaatcaaaagtacattacttcgggcctgttcttgtcagcttactaaacttgaacttatttgaatggaatttggttgaatgtattatatcgatcctatatttgagtgcttcatgagaccttattggtcttaaactcaacacttgaactgaacttattggacctaatttttgaatgtaaagagcacacattcttagtgttaaacattttcattaattttacgactgcattatttaatttggaaatgaagagggtttgtccgtttgtggttcattaatattgatactacgtgtacttattattgttctctttagacgtgagccaactgcggggaagactaagccggaaacaatacttcgacaacttacaaccaaaaaaggacaggtaaaatgcaatttgtatgtctgttactgtggtagtagactagtagtaaatgatgttccaccttttctgatgtattgatgtaagattagggtatctactgagagaataattttcctagagctttatatgaagtattaattttttattgatttttagtctttttgtctgctgaaaactactgaatttcattacatagttcttagatttatatcaaacaaatgagcaaccagtgatttgtgatattttagtatgaaatcttccacgtttggaagatcagttttcagttacttgttttaaaatccataggtttttattctgctatgggtccagtgatttagagcagaaaaaaaaacataactgaaagaataaaaggggaattagttgatagtttgatgaaatagaaggggagttgccttgagatcaacgtgatctatacaatcactcactgctcactttttagaggtggagctctccaatagtataagctaagagtaattaatttattgttgcattctctctcctgatcctcctttcatttccttatctgatctatccttagtgttttttattttcattcccgaccattgtggcctttcgtaacgtaaatgattaatggtggtattttgtgttgataattttcatttcattggtttattggccgatttatttatgatttggtaatgagaaatcatacaattttgaatttgccagtgtgttgaggtctcacgtatcctatatgcttctgccgcaggtttacagtttaaatcagggaaaaagggatgtagaaactgttttaacaatgggaattatggaagatgttagcattttcccccagcctgctggaggtaactgtgtcctgtattcttattagctttatcaactgaaaaaaatgctggttttttttaatttttttttaattttttattggtagatttgtattgtttacgcttttaaggtttaaccatttaataaataaatctgtttgtaagccctttgtgtttaatatcccttttcgaagcttttgttggccgctgaggcactaaagatgctctttctttctgtgtattcctctttaagaggttacccatgtattggtgagtctgtataggctttggttaaattcatacactatcaaattaggaaaagaaaaagaagttatcgagtttataactaaagagtttgcgaaaggcacactcgtattcacccaaccaaccttgaatttaagtttgaaggagatgcaaaactaagtgatagaggctcatataatcatatagaccactttgccttgttgtaagcccatgttggcgtagtttatgttttccatatcccagtttggatgattccatcaattacagttttcgagatgaattgtcattttgcaatttcacacctgcaataaccattgtgtgggcctgtggctatgggcaatggactcacaagtcacattgtactgactttccttctgaaagcatagaggacaattgatttcgcgttctaatattatgctttaacagagtcaacagagatgatgagattgttttattgtgcaacatctctcctagcctgagattctttatgtcgtcaaatcgctctattggtctttactttattagatcctttaaagtgaaagatacccttttctatattaatttttgtttgaatggagtcaagctacctaggcaatttgatatatgatgttaccgtcaacaaaattgtttggcttctgtagtgtttgtttttttggatggaataggcctctcttatctgtatccacttcattgctaaaaaagattgtttatgttggatgagaagtttgagttttgcatttgttctttgttaataaaaaaatattagctgttgccttaaacctctggacgaataaaaaatttagtctaacatatatcttttgcttctaaaattccagacactggtaaggttgatttggtaatgaatgtggttgagcgtgtgagtggaggtttttcggcgggtggtggaatttcaagcgggtaagagaacatgtgactctgctctgtgcaatttcttatatgatggtcaatgttgctatgcatatgtttattctgatccaacaaatgcatttacaggataacgagtggcccattgtcaggtctgattggaaggtatatatctgctcttcctatttctgtcggataatctattcaacttctcatgtaaatgccatacaagaaaaagcatttcctcttggtcaatttctatgtgataattgggtttaaggaatttatatactcgcatgcacacacacactgacacacatacatcaaagcaacatcttttttgattaatgatttcttaacatgctgtgaactaatactttctgtttatgttagtttatgtgtgcaaattttataattaataatagcttttgctttaatttggttgcagcttcgcatattctcacagaaatctttttggtaaaaatcaaaaagtaaatgtttcacttgagaggggacaaattgactctatatttcggataaattacacaattccatggattgaaggtgatgataagcgtacacaacagtcaatagtgattcaggtgattggcatcagtcttggctgtctgtatatctttttagaaaaagcgggtattgcttatctttctttgtgattttgattctctaacttaactttattggtcatccagaattcaagaactcctggtactttggtccatggaaaccaacctggaaatactaacataaccattggccgtgtaactgctggcatggaatttagccggcctctaagaccaaagtggagtggaacagctggacttacgtttcaggtatctttgcataatctgttttgtatttctttcttgatttctcattgctaaatttgatcgatcaacttgtgggtgacatacgtgagttatataattaccattaatgttattgcagcgtgctggtgctcatgatgagaaaggggatcctataataaaagatttttacagcagccctcttactgcgaggtatatgaaattgctggcagcaacctattagctaaaactttgagactgctgcttctgtaaattttcaagtccatagctatttattcctgcatctagtttcttgctttgtttaatcaataccttgttttcagtgggaattctcatgataatatgttgcttgccaaatgtgagtgtggctacactggtgatttaggttcttcaatggttagtcctctgatctctagaaacagatgttcattatactctttttgctcacatatttttatatgctctttttgctcacataatttcattatgttctttttgctcatatattttcattatgcagttggtcttcagtatggaacaaggtcttcccatactgccagagtggctttgctttaatagagtgaatgcccgtgctaggacagggatggatgttgggccagctaatctccttttaaggttggagttggttgtttaaagtttcctattatggttatgtagagcctagttcagagtgtatgtggaaatttagtgtatccttattctcaacttgtttttggtggttcttgacattattacattgttacctttgattcagtttgtctggtgggaatgtggtgggtaaattctctcctcatgaagcatttgccattggcggcacaaatagtgtgagaggatatgaagagggtgccgttggctctggttgctcctatgtggttggctgtggggaattatccttccctctggtactcatgatttaaaagctcattgcaattttttctaacttatttcacttctttagttctctttagtatatatatatatgctacaatttttctgctgctatatctttgaatataaattgttttgcttttgcttgggatgtggcaatgaggactgacaatattgtctttcagaagggatttgatcttgggaacatttttcattttatattttaatttatcttgaaaaacatacaaatggctcatctaatgtagaacctagcaagctccactgcttatactactgtggctaaggctgtcagttaaagcttcagaatgcttggaaaattattaccgtaaaaataataataaaaaaggttctggaaatgtgtgtatgaagtattaagagaagcaactctaaaaagtctatactgtagtaaagtgaatcaatgtaagagaaagtacaagtgtgtgtaataatcaaataacattgtgataatgttaaattgattaagcaaattgatatgttgtgatttgttgtagtagtgtgcaaatatcgtttgatttaagctgattgttggacatatatacttttgttttttgttttttgtttcaaaaggctctccccattgatttaagcttacaaatttatttattttttccagtttggtccagttgatggtgctctttttgctgattatggaactgacctcggatcaggctcttctgttcctggtatgtgtagcccaccaacccaacccaaaataaaaataaaaatagaattcaaatataataaaacggacatgcaaaatgagtcgagctttgttattatcattagtagccctagatatttttggcattgttaatcatgctagtaccaaagtttgaacattccagctttctaataaatggattgattggattcacaagaatgaagctcgttattctgtagtttaatttgtaattctttaaaacattgtgttaaaaatggaaattaagagattatgaggatcattatacattgatatatttcagacattgtgtgaactgattcagttgaatgacgaagataatgataatgaattgattacatcaaaattacactgggatagtaacaaatttttttaatttttagtttttaatttttaattttttttgtgctaaaaaaaacaacctgcaaggctgcaacactaaaagtatttaacttatttctttctctattatctccacagcttcactaaaattccagattcttctcaagtgttcaataacaatttttttttcatattctaaactacctatcccataatatcgtttcttagctgacaattaggtattgtggaagtatgaagtctttgcctcttttttccgcatctgaatagactgtatttttgacacaaatctgtccggttcttaaaaagaaaaaattgtggatttatcacttagttgtgtgcgagttttcattacaaattttttttacagttagagataaataagattttgtgatctttattatacaagtggaggggggagggagatggtatccctcttcaaaaaactcaaaatacccttaatgaattaaatgcatatttaaaaagttaattttgtttaatttttcacttgccaattaaaagtagtgatcgtattttattgaacaagttaaatatgaaattttattttaaaattttcaatcaaatattaaagtaatgagaatgattttcttttcatatttgacatatgaaacatgctattactgacctgtgtatatgaaactcgatctaataagaaattatatgaaaattatattctaaaacttaaatgttaattttttattattcagtattctctatcatatagataaaactttttcactttattttagtcaacgattgaacctaatacacaaattccttttcactttatatgaacacatgatttttgttactttaaagaaaacaaataaacattgttttaagaaaactagcaaaaaaatacaaataaatgaatatgtatgttcaattgttcaaaccaaattttctacagctaacttattttaagaaataacattaatatgatacatgcacacccttaattgaatgtgacctttcatgtatcaatgaaataacaaataattcatatgatatggacatatagttagattgttaatgcagagcttatgtgagagatgggtatgattattaaatatttttcttttaaattatttcataggcgatccagctggtgcaagattaaaacccggtagtggatacgggtatggatttggtatccgcgtggagtcacctttaggtccattgcggcttgaatatgcatttaatgacaagcaagcaaggaggtttcattttggtgttggtcatcggaactaacagagcttcaattgtttgggtagctgcttgcatcatctatctgcgattttgttagagtaggaaaggaaaaatgctgcttgtatttttgcagtaattggtctggaatcgatgagaatggagggctacacaaacttgaaaatatttattctttgtttcacaggctcaagtacatcgtctcatctgttttttctcagctgtgaatgtataataagtttaacctgcgaaaattgccattaaatcacttgctcaattattaaccttgattctgctacatgactttcggcgaatcttgccatctacaaactgtacgttgaatctttaatagaaataatcgcggccaaatcttgcccgtctattatgagtaactggcgcaaattctactatggtcccgggatcatggtcctctttatggtcccgggcaaatgttcatcatgtaaaactcaaatgtcaatgttcatatttgaaaatg

SEQ ID NO: 1776 - DNA, 7214 bp, Kochia scoparia
taagtggaagagatgaaatgtctagttatggaattatggttgatgattttggtttctggtttggtaaacggggaattctctggctagttttgcattgatgaacaaagtcattgcaccaagccaccaactgttttcatttgaaggaggctccccgactcatgtatttttcagccatgaatctcgatcaagtgattaatttgatcttaggtcattcatattgctcttgttgttcgcatggtttttttaaaactttctagcattcagactatggtaatttcttttttcatgccaacacttccatcatttgtcataacctattgcttgacgaagattctgtgtaatgacatgtgcttgagtttccacttattcacaacaaccaagttgtgagaagttgatgatttatagggcgtgtttggcaatagtagctggcagtgggcgtttagttgtggaaatagttggtagtgctaacattggtagttagcggtagtagtagatgttaagtgtcaacaagggattatacaatctaataatttggcaatggtaacagttgtatatataataaaagaaaaatggtataagaagaaaaaattgtacccgctacatgacaaatgttagtcctagtgttgagcaatattctctttaagtacttacctctatccgaaacattattttgccaaaccataatttaaattaccaagtagtgttttgatctagccataccactaaatgctatcttatactcctacgccgatcacgcccatagcataggtgaaactatataaaaaaaaatgctaatgaaatgcccctatcccaaaacaaaataaatgcattgtaacccaagtattagtagatttgatcatggtatttggttgattttgattaatggctgtagttcccaagtacaataggaatcttctttggtgaatgtacccacgaccctgaaaaaccttgaattttgcatttattgtaatcaatcaatcaatcaaagccttattatcatatgtggggtcgaacatgaaccaaaagtgattattccaggaggtcatccatatagattttcctcctctattctctacgatcgagagcctcactcttgcaaatccaactgtttcaaatcctttctaactcctccactttatggtaatcattgtataaaaaaacaaaaaacaaaaaacaaagaaagaaaaagaaagaaagaaaagaaaggagatcaaagggcataatagttaattatgatgccaagtaaaaaattagtctgggtcttgggaaatagtgatgtgacaatgaagaggttaacggatgatggtttattccactggaatttgttttaattgttcgtctttcaaaccttgtttgagttatttagttgccttttggtgttgttcaaatcaatttattatcgtgaatttgtgatgactgagataggtgttttcacaacgtatttggtctagaactagtcacaactcgcattttgtttgtggtatgtgtagtagtgacggtgtttccacgggagaaacagagttatgctgcgtttgcatgcattattgtttttggtatcatctttgtttctgattcaatgtttggaattgaaatggagattacttcctagttgtttaaatatcttatttgtgattcaggaagttgagtttggtttaaaatgtatgtatctttggattttagaaaaagccaagggaggtcaaatgcccaaatgtgacttgtgatgaagggaattaaaagagatatggagaaagtaggatcatagagctctggatagaggtgaatggaggaagaggtccttattgatgattgtaacatatgaattcttgattcatgcaaccgttattcgtttgacaatatcaaagctttgttataattcttaaggctgtagtgtttccttgtagaaatgctgtaatctgcaaattttgcacatttaatgaattatatgatgggttatctttaaattgtctataatcttaattgtggttgtttaaaatatgtctaagggcaagacgacataccatttcagtatttgttggggatgagagtggaatgataaatcgaattgctggggtcttcgctagaaggggttataatattgaatctcttgctgttggattgaacaaggacaaagctctctttacaattgttgtctctggaactgataaggttttgcagcaagtgatggaacaacttcagaagcttgtaaatgttctgaaggttgtcttttgctttagatgaaaattaattttgcattgatgttttccacgaagtattatctgagatctattctcatggccttttatttatgtttaggttgtagatttatccaaggagcctcaggtagaacgtgaattaatgcttgttaaagttggagctgatcagagtaaacgtgctgaggtatcattcacaatatgtttcggttccccaaaagtggaagctagtaatattattcttgcttgtcagaaaatttcgtttagttgtagctaattattttgaaacagtaaatttgttgtatgctaatcttccgccatcattcatcctgattgaactttactgtacaagtatctttaaatctttgagctgagtgaattctaatttataatgtttgctacttatataataacttttgttatttccttttgatactgcagttaatgtggttggtggacatcttccgtgctaaaattgtggatatttcagaagaaaatcttacgatggaggtatcactggaaacattatgcagattaagacaaatttctaaagaactatgtaatcatcctaacgaggattgacttccaagaattaaacacatgttatctgctttatttttcagtagtctttgatgctttaggtgcatttgaataatttctgttttaatatatattctaataatgttatagttactgtatgtgattctatgatccaggagatgtaacttataagtattttgttttgcttggtgcatacccatttacttcctggaaatatttcatgtagcttgtgtcatttatatacttgatcaaacaaggtccgaaaggaagtcatttgagcaacaacttttaacaaccaaggtcccttttttttttttttgaataaaaaacaccacattggccactatatcaaagatttcatgtagcctgccatatctacatgtaaagagtcaactctgcacgcaatgctttttgttcaatgtttgtgcctttgtggtgtcatggacctcatggtgtggactgtggaggaacaaaaactacatttggtgcctacttttatgactcaggattatgttatccgtaatttgctaatatgaaaacaatgagttcatggttattgttttagctctttgcaacctgaattataagttgttttctactagcatttgatgtttaatgttatcatttacatagcaagttgaatatttataggtcactggagatcctggaaagataattgctgtgctaagaaatctaagcaagtttggaattagagaaattgctcgtactggaaaggtttgttttaagttgttcagtttctgcattgcatgtcgtatttcattgaagagttggaaacttttcatgtatttctgtatatgatttgaaatgttgatattatccttcacagatcgctctaagaagggaaaagttgggtgaaactgctcctttctggcgtttttctgcagcttcttatcctgatcttggagaagctatgtctgaggatgccctccctgaaatttcaagacgagctcctgagactgaatcatcagatttatctgttgaagtatgttctttgatagctctccttatttttggcaactaatttatgtttgtgtatttactttatgctttcttttgatgaagtctataaagaacttgaccttctgcatagttagaaactatgttatttagactcttcattttacctgaagtacccgtgttggatccttgaatctcggacatgggtagactctcggacatgggtacgatacttggacacttcattttgagctaaaatcttggtatttttccaaaaattagcctagttggacacttggaaacgtacccgtgtcggacataggtatacatgtccaagtaacacatgttagaaatctttggagcttgtttcacaagctgttaagattgctcaaggtgtcaaggcctcatctcacttattaatacagagttgttttgttagaagtctcagaaacttataaaccaggctgaaatttgaaaagataggctagtataatactttgctgtttttctctcaaaaaagttctaaaacgacaaagagggctagtaatattagagaattactgatttaggacaagggctaatgaatgagtcttgataagttcagataagggtcaataagtttaaatgaggttagataagggctgagaagttcatattatgataatagttcaaataatggattagtgaaggaacaaaggtgaaagatagtgatttaagttcctagggatgcacaattaccatgattattgatacaacaacaatgcacgattctatagctgaaaggggatctttatgctgcaattcatcttccttgggtcatcttttccattaaagagaataatttcctggtgagaagagaaatcacgagaggaagtatgaaacttccttataggacatagaacagattggacactccaggaatgaaaaaataatgctctaatgaacttgcatatcaccatatttgttgaggcaaacttaactcctgactatataatcatatagtcagactgttttaggattctaaacaattgcagataattgtgttcatgcttggtcgaaaagtttttctgcattatatttgaaacaaattatgtcagcaggtgataaataaattgtgccatgctacagaaagcgaaaaaattcatacattgatttatttaaggtaattcttcagattgtaatgtgtacttctacagattatggagcctcccacaattgttgtgaagatgtccactggtttaggattgttatgtctaattttttttccatgacctaatttatcacttattttcgaaaattgaactgctatttccactataattcgctgcttctccactaattcatataacttctccacttaacttctccttaaactacttaatgaactactttcccccttcatgaagatgtcttccaagaacatggagtccatgcgagtcgtttgctggccatggatttggggacatctttttgtcacgaattttgtattgtatctctgtgttattgggaatatgctacaaagacactatttagtgtttgcctaattatattgactcaatgagatatacttctatagttatatacttatatactaatcaatgcccattcatgggttaaaattttgatattacagggtgatgtttacccagtggaaccttttgatggttttgcagttccacaagtccttgatgctcactggggtgtcttgaacgttgaagatgtaagtgaccctcttgttttcttcaattaaattattctacatttctattgtatgctttcagggtttctgttcatttttttaattaattctgtacttaggtctcattactctcttagtctcttgagctcttaatttacagctgtaatggccccctctttgtttcattgccaactatgttggcagatgatgtgggataaggcaatgatattctgaatttaattgaatgttgagtaaaatggatgtgtagttggcaagaagcatttgttttggttggggttaaggtgtttgggcggaaatttagtaacgctagcatgaatatattaaaaaccattaaaatttcgtatacttgtatgaactatgaagtatttccttatctctgaaatttctctgatagctgtactagctatatacaatgtctacaagttttaatatggttgaattattaaattcataaagatgcttagcacaaaaattttatttagtggtttttcctattctaaaccagataactaagttcagactgcaatcaagcttagcagtagcacaaaatgctagaaaagcaaaacttattataatttcttttctgtcgagacttttttacaggcttatctagttatttgtgatgtttggtatgtccactctataatttgatagaatgatagagtaactgtttgctatgtccacgaggtaaccaattgtaaaaatttaaatgtatatgaggacactggagcaacctaatgtttggacatatgtatgcagacaagtgggatgcgatcacacactctttcgctgcttgttaacgacaaacctggggtccttaatgttgttacaggggtttttgctcgaaggggttataatattcaggtgtgagtcaattcttactctgcatgatacaatttaagttctgctgtcactagctaagtttatattgctgatttttctggttttcagagtttagctgtgggccatgcagaaggggagggtctatctcggattactactgttgtacctggtacagatgaatcaattagcaaattggtgcaacaaatttataagctagttgatattcatgaggtgagaatatctattcatttgatcgttgttacccacaatatttctatttttgactcatactcataatttattatattatgctattttatttctgactttaggaagctgcaaacatggaaagaattttgtatgagttttgacgtcagtattttagttgtaacgaatgtctttgggtgtttctagcatgtttgaaagctaatgttatttgtttaaaatttaatctatttatatttttatccaggttagagatatcacccatctgccatttgctgagcgagagttgatgttggtgaaggttgccgtgaatactgctgcacgccgtgaggtccttgacattgctggcatttttagagctaaagctgtcgatgtatctgatcataccataacacttgaggtaataatcaattcggaaggttgctcaaaaatattgttgactccgtttcaaatgcaacttttttaatttgatgttttgatataattgctaccctcttgtttatagcatgttttaaaaatcaaagtttgggcaattttcttaactatcttaactacagtactacctctgtgttttttagatgtcccactttgggttttgtgatttttaaggtaacattttggtgtaggtgattaggtgagtagatgggtaatttaataaagtatgtgggacccataga

SEQ ID NO: 1777 - DNA, 5508 bp, Kochia scoparia
ttttttttttgacgcggaaggatcattttattcaaatataagccttcttagtatctacatcatcaatagaaaagaactcaaaaagacttaaaaaacagaaacggaactataaccacaacacctaaactttaatctaatcaagctcaactccacgaaagtgcatacaatcatgtaaacatgataaaatatcgacgtcaaagcatatttcaatagaatctacaccaccggtgctgtagatgttattgcaaaagcaatcgccccgtagatcaaaccctttaatttcattcattagtatccttatttggtcatactcttgcattttatttagatgatattcaaaaggagcaatgcattgggaaattctcccaccttaacaatgagggataaaaaaagcacctattaggtgacttttgaaggctcatgcactatagaatttgcgtctttgtttcatttattctttggtgtataagtgaagtttattgcttacttgatggaaggttatctcatgtctataataatttttgagaattctaggttaaggtatgagagaggagtaaacttcaatttcctgactctttgtagtttgtagaagtcaattcccgatgtatcccttctgttgttttgctcctcagtctagaaccctgtgtcacctcctttctgaattggggttttaaagagagttactgtatatagtttgtcaagttacattgccccaaatccttgaacggaagtcagttttcctaaagaatgtggttctctcattgagtcttgccatgtttttcctatgtatttaaatctctgtttgggtaaaaatgaaatggctatgcaagatgttgaggtttatatatttttatatttcatatccagggtgatgcgccacacgatttcagtttttgtcggtgatgaaagtgggataatcaataggattgctggtgttatttctagaagagggtacaacatagagtctctcgctgtcggattaaacagggataaagctcttttcactatagtagtgtgtggtactgaaaaggtgttgcgccaagttatggaacaacttaacaagcttgttaatgttttgaaggtaatgatctaatttaaacttgtatttaagtcatctctgatgccctgacaacgctgacgttggtgtcataaagatctttagattgtacacggcttacaactttcaccatttggcgcgtagtaaagaaacctgaattgcccatcagatcttctgatcaattgaattttgaaaatagatatataatggtgtattataattgtggttatcctatccatgtatgtttgtacatggtagtgatggtacattgtcttcacagtaatgctggagagcgtagggcttgtgttgctacctattgtttaattactcccgtccgtgtaggttgaagatctttcaagagagccacaagtggaacgtgaattgatgcttgtaaaactgaaagcagatgcaaattaccgtgctgaggtatttcaacagttttggttaattctcataatggcataattatcactttaaatgttttttcgtattcaattgtcagctggtaatgaagaagaaattgcggttaatcataagaaaaatgttcacagaaagctcaagttcttcggaaactttattgcataaaagtattgtttagaatatgtcttaattccaattattgcgtaagaagtctcaaaaatcaccaattacctcacaaaactcaccctttcaataattaactacctataatagtcactcctgttttactgtactccccttatgcagttatatccatcttttagtatgtccgtctctctccatctccatgaattatatgatccgggatttagttgcacgttatcttcagttattatttgtaatttgctattatgcaatcacaaatgaaggtttcagaatctttttcacttgaacatgaagtcaacttgtgaattgtttttaagtatctgttattactaaggaaagtcacgggcattagtaaactcacattcctctattgtgcaaattttcatgaaacatagccatcaatattcggtattggagtggtttcccatattgtatacacaaattttcacatgattgtgtgacactcaattattaactctctatttgcatggctttttaaaaatatatatggatgggcggagaggaatctatgttagtagttatctgctctgtgcattggtcagttaaggatgctgaattacccaaatgttctatttttttggatctgcagataatgtggttagtggacattttcagggcaaagattgtggatgtgtcagaaaatttagtcacagttgaggtgagtgattgatgaatggttattttgtgtcctaaactgatgcaatttactgtgctaatgttgtcttcatgtaaatcatatccaattatatatagctcgatgtgtaagctctagattttcatattgcagcctactctataaattgcaccttttataataatgtggttagtaagactaaattctcctttttattgtagacttaatagttttacaggccttttatctggtgctgtgcaggtgactggggatcctggaaagttggaagctgtcctgagaaactttcacaagtttggaattaaagaaattgcaaggacaggaaaggttagtctttttgtcacttgaatagaagaatcagatagatggaaagtatacaagtcatagtactgagaaggaaaagtatagttggagtaaatagctttatagtctactgttgattttgtaaacgaattttttcaatgctaattctcagtgagaccaatgaagataaaggtttttgatgttttgaatgtgtgacagattgctttaagacgggagaggataggtgagacagctccattctggagattctctgctgcttcttatccagatctagaagagaaggcctctattgctgttgttaagtctgcagaaagaagtatgaatggtaatgctggctcatcgttgagtgtaagtaaagtttctcctaccgaaaaatcatctcattccattctccccatttgtctcttctatgagcgtcttttctttgtcgctttaacttttaaagaacatatggacttttatatgcttatgatttgcaatcctgcttgattttatttcatattttctatctataacttgtgattgcttgtcatgaattcaatcataagctttgtgtttgacaatttgtatctaaaatgtttcttttgttctctacagggtgatgtttatccggtggagccttatgatctttctccagcacatcaagtacttgatgctcactggggtgtcctttatgatgatgatgtaagctttatttgttgcttcccgaatttttcttgtatcgttgtcgtggaatttgcataaattgtgaaattcaagcttatactcagttgttttcatctgaagggtcaagttaaatgcctttggcatggtttttccccctttctagagttgggtcgttttgcaatttgattttatgatgaatttactctgctagatttttttatgtgggagtgctttcctttttcaattttcagtcaagcgggcttcgatcacatactttgaccatggtagttaataatgttcctggagttctcaacactgtaaccatggtgattgctcgtaggggttataacattcaggtcagtatgactctcactgtatgtattaaaaatatgtataatgcattttttttgtgatgtggtctcatatttccttttcttccccatcctcagagtcttgctgttggccctgctgagaaggagggtctttctcgtatcaccactgtcgttcccggaaatgatgaatcaattggaaaattggttcagcaactgaacaaattggtagatctatatgaggtgagattatatgtgtagtgggcatgttgcccaagtaaggtagttttaatccatgcttatatatttttaggaaaaattaacaaaaataatccgacctttcagtggtcttccaaaaataaccggacctttgaataatcccaaaataatcccacctttgctccccatcttccaaaaatggtcccttaccggtttgtgacctgttgactaggttaatttgcaacgtgttgcttctacattggctgtaattaaatttaatctaaattaatcaacatttaatcataattaaatataaaactaattataattaattaaattataattataataccatccctcaccacctcctgccaccacgcaccacctgccaccaccacacatcacttgccaccatgacccaccaaccaccacctcaaccatgcaccatctctctcctctctcctccctcaccaccacaccaaccaccatcgccacacactgaaactacctactcaaacccaggccacaacaaccatcacaatcactattctcccaaaatatggcgcaaggaatcaatacttaacgccgccttaactggcgcactctcgttcagaatgctcttttcttctccaatctcaattgttgctcaatctcctcctaatcagtcatcttcttttgtcgaagactgttgcaacaatgagtttccattggtggacgaaacatcatcatcatcgagtaatttgagaactaatgagggaattgcaaaggaagcatgggagaggggggcttaatttttccatatttttattgtaacaattttgaccctactatttcatggaagaatctcaatttcttatggaaacccagtctcattggtgcaatgcagtagttcaatttattttagctttgcttttgtgtgaagtagtgattaggaaaatcattggtgttgtcatttgtcagagtttatcggtcgatcctcctccttgcaataccttaattctcagttgaattacctgtttttggtaacattgtttggcatagatacttaatatttttcgtatgaccttccatcctttgccttggcccattgttccaaggtccgggttgatggctcaacatcatggtcagcaggcctcatcaaatattttcaaacattttatactccatagttatttattgatcatgatagcctgtggtctgcaccttctgccttgttctggtctccaagaaccagtctaggcgcagcacatggaccattcaggaaggtgctgtgctaggttgggacatgaaaatgctggcccgcttgctagcatggccaactgcctgctttaattcctactcttcatcaaaattgtgacatgcatattgtttctagaaccaaactgtggtgctacgtctaaagatctgtcaatctaactataaaaatgctgtgcctgcagattcaggaccttacacacctgccatttgcagagcgagagcttatgttgatcaaagtagctgtaaacacttctgccaggagagatgtccttgatattgccaatatattccgtgcaaaagcagtagatgtttctgatcacaccataaccttacaggtatgccatacacgagatgttgtgcttcactctttttgcacttgcaataatgaggtgcatctt

SEQ ID NO: 1778 - DNA, 2741 bp, Kochia scoparia
catgtcttgaaagggaaaaaaatcaaagtgggacaactaattccaaacttcctaaaatagaaacttggacatctaaaaaaaatggaggaagtatatttttactattttcttatctcttgtagctagcactttattttctgtccttattccttgcttgccaagtttgagtgtcgccatattttttgaccagagaaagtacaaactattctttgtctgtcccaattttctatttctgaaacctttcttgcatgtaaagattctcattctacctattgaagataaatattgtggaaggaatgatccatggagaaaaacatggcttgaagttgactagatcttctgaagattttttttttaatacattgatgaactcatgcacttgaattttcctaaaatggatttagcatctcaatgaatagcatttgcttaatcattctgttgatagtcacgatacactgtacaaaagctgattctaattgtgatgcttctgaccgactgactcccagcttaccggagatgtgcataagatggttgctctccaaagattgctggagccctatggaatatgcgaggtaggatttctgtacattgtctaagttgcctagtatgtcaaaaatatcagttgtttcttgctcggttctcacatcatctgtattgacattattcaaatacctgtaaaggaggatttcactgtagatatggtggctttgcacttacttttcgaccaaaaatccactatcatggagactactctttattcagtacatcaacaaacatttaatatgaatggataattggatactatgagtgagatgtactcttgaatatgaatggatagtatgagatgtaacgtttaatatgaatgctatacacttgaatatctgaggatatctgacttgccatactgccagtttgcttcctcatagtagtattgcatcttcttttacactacatagcttgttactgtattgttttaaatgtcttaataactgcatacatgtttttgtaataatataggttgcgcgtactgggcgagtggccttggttcgtgagtctggcgtagactcgaaatatcttcgtggatactcttttcccgtataagtgtctgagcaaaaaaaatacttcgggaggaaggcattcgagttttgtcagaatatacttttgcaatattttctttattgtttttataggtagaaagtaagcaatcttgtaacctatttttgttgtttgcttttgtagaatttttttcaaaccagaaaacttttgagaattgaacaaatgaagtgtatttctttctaaggtatatgttctctatccattgccggttggttttcttcccatttttgtgtgtgtgtgtgtgtgtttgtcgatacttgtgagcggtactatggagctcgatacttgtacgttgttcagatgttgaatagtaatatacgaagtactctgtcgtatctttatgtttatccatatttttctgcagattaagtttactgtaaatcataaccttgtgctcatgatgagcgtccaaatcagattttcacatgccaaaactatatgatgcacttctttcactagtgtatcatatacaagaataagtttaatgacaacccaccaaattaaattttttaaaataagtttagtgcgtcctcaataatatttaatttttataatttttgaaaataaaatggacattgacatatgtaacgaagggaatacttttggggtttaattcatttaatttaaaaaaaagtaagttgagacttgacagcaggaccaacaaatcgtgatgatgcgaaattgtgaatgacacgatgtttgtgcactctcctccgtcctcagtccaaaactcaatcactcaaatctgaaatattcaccagagcttaaccacagcttaatatcagcaccaagtcagtcgtcacagcttccgaccaccacgacgaggttctttttgctgcctttgagcctctcatttttgtttttgtcatgcaactttatatttcaatatttatatttatattttgaggtgtcaatattgataggatcataaacaattatacataaggtttgaaggcgaatcgaacaagatttcctattactcccagacccagtgtaaaaaactaaacaagtcaaagtttatgagtgagtcaatagtatcaaaatatagcaacaaacaagattccaatgttgaagttcattttgtagaattgtggctgaaatttcaattaaactagttactttgttcaattgtcagttaaagttttgcctaaacattgcttgtgcagctgtttttttagtttttgttttttgcatcttattgatggtagctgtttgattattctgattttattgttcatacttaattagtattactgaatttgatttatgattttaattgctattattgtgtttgattgtttgatgtctattttgagtctaactgaataaattataactacgaagtattatttttatgaatcaatttattatttttcatagacaattagaaaaacaaataatcaacgacctattcatcctgctagcttagtacttgggactgacaactttgatgagagaaaagaagaacacagtttaaatagttttaaaaatcaacattaactaaattatagataggggtaaatgagattcgaacgtctaacgtacttgtcaggttggctatggttgagttgagatggtcttttaatattatcatgtatatgactctacaatttgttatgcagcgc

SEQ ID NO: 1779 - DNA, 1203 bp, Lolium multiflorum
aacagtattataaggactagggtgttccgtgtcttatgctggattaaatttcttgatgctgatctggcaaatgctgcaggtcactggagatcctggaaagattgttgcggcacaaaggagcctaagcaaatttgggatcgaagaaatttgtagaacgggaaaagtatttttctggaccatttgctacgtacatgcatgggcacatttcttcattgtctaattcttctatctcaatgttcttagattgctttgattcgtgaaaaaattggaacagctgcccgtttctggggattttctactgcttcttacccagacctcatagaagcatcgcccagaaaccctcttcttacttctccgaaaaagacggttaatggcagttttgatcagccatccagtgctggggtatgtttccatgaatataagaccaactacatatttattgcatattccttcttgttctgcttcaactgttctaaaagcgaggcaacacttaggctataggtgccacagtctgcctagtaccttttaaaacgctgttactccctccgatccaaaatacttgtccaaaaatgggagaatctacacactaaaacacgtctagatacatgcatttttgggcaagtattttggaccggatagagtatttgtagttttaaatacttggtaatctacaccacgctgaaaagatgccccttttacatgaatgacacaatcaataatttgatgtgcaataacagagaagatctcacgaactctgcatatctttaatagctatagtgtaaacaaaggcaactgaacttctctgtcaccagtaaacatcccagtgcagccgtagcactgtaagtgaatttatagatgaaggtaatttgtatacctggccttaggaaagcaaaaaaaaaattgctcatacatcgaggggagatacctgcgtgctgacaaaactaaaaaccacacagagatactcatccccacgcaggcagggatataaaacaaataaccagattaagtcgaacattcctatcgtttccactacatcagacacaaacgcccctcaaaggaggccaacataaatatttcagcttcctagcttgaagttgaagtctgatctgcatctttaacatgaaatcctggtatgtagtcttcagcgaccccaacattgctgcatagaaaatataatttggtaaatgagcgacacaggattca

SEQ ID NO: 1780 - DNA, 1074 bp, Lolium multiflorum
actggcatggttatacttcttgagaaaatattataagttaattcttcttttatttctaactagatctaatgagccttattaatgtaatagatagctttgcggcgtgagagaatgggacaagcggctcccttttggaggttctctgtagaatcctatcctgatcttgaagtgaaaaggccttcagaatctaccctaagcactcaatcaaagacaaccaatggcgactctgaagaatctttgcaggtaggacatggtaattctcatcattcatataatttttcatgtatccattttttctttagcattgcaccaacattgtttccatttattttgtacctggattgttgtgttgtttgaattcttttcatgcattcaacagaaatcaacacgtgcaatagaatactctctcttccattcttcattagtaaggttgttcttttctgatttggtcttaatggggatttattgttgttcattttattaagatatgtcctaaatatatttcttccaatctgagtttacaagggaaaacaatatatagactagataatctaccaatattaaatccttgcaagtgtaccttctatgcaatgcgtattgatgcgattagctacatttgcctatttaatgcatatgtttagtagacaagcacaacttgatgcgtcatttaaattgtttgtatgattcatagtatcagcattctgttgacaattacttgttttattttagaagttgtaaaaagttggctatattatatagcttaactacatctcacaaacaatggtagaaaatgaccattactagtttgttttgtgtagacaattttattgcagaaactttttctattatccacatagttttttttgcagtttgatgattgatttatatattcttatgttcttattactagggcgatgtttatccagtggaatcttatgaaagcttctcgatgaatcaaattcttgatgcccattggggtgtgatggctgacactgatgtaagttcttgcattcttctttcacaagagctgctgtgttgctgaaagttaatggcaagcgtcccaaagtctagtgg

SEQ ID NO: 1781 - DNA, 838 bp, Lolium multiflorum
aatggtcgcattacaaaggatgcttgagccgtacggcatatgtgaggtttgtactgaacgttcactttgcaaatgcgccatagtaatgatagttcatgattttagagtacttattccaatgtaaattgtggtttagctactgcaattactgattatatgtagtcgatcctttaacctccttggccatacgtattctgcagattgcacgaactggcagggttgcgctgagccgtgagtcaggagttgattctaagtacctccgtgggtattcgcttcctctatagcgtgtcagttggcgagacatcacgctctatcactttgcagattgccattcttccgatctcggatctcgtaaactctgaatatggaatggtgtttcatttctttgggagcatacatcaagaacacattggtcatagttaggatttttttttgttcttttagataccagagagaaatggagttgggatgtttgaatcctatgtgaatacagggtgggagaagaaactcatccatagtttgcttctagcgtcgctgaggttttatgattccctcttcggggtgctaagcagaattaattttctccgacagcccatcacgtggctgctatatgtaccgcgcggagaggtgtatacatccaaaaccgtgtgcttccccaccgcttactccttctctccgccgcattctctaacgtgattttgacgccttcgatcgtgcttgtgacctagagattcggcaccccatgatgcacgatgtggtcgaggaacttctcaatcggagtaggggttgctggccaggttgccggcatccccgtgtggctgtggaaccctggccaccc

SEQ ID NO: 1782 - DNA, 651 bp, Lolium multiflorum
gccaggagagggtacaacatcgagtcgttggccgtcgggctgaacaaggacaaggcgctgttcacgatagtggtatccggaacagagaaaatactgcaacaggttgtggagcagctctacaaacttgtcaacgtcatacaggtcagtatgttcctccaataaaccacttgaattacaagatcattgctaactgatacgtagtaatgcgccgtcaattgaatcgttcatttcatttttcgtgcttgtttcagtcgtcagatcctctgatattcgtagctttgtatattgatgaaacaggttgaggatttgtcaaaggagccacaagttaaaaaagagctcatgctgataaagctgaacgtagagccagagcagcgtcttgaggtaaatttgtatgcgcgtaggatgctcgattatatgcttcagttggagtggaggtgagggtagaatgctgttactctttgcttatttctccacttgtacgtacatgcaggtgatgggtttggttgacattttcagagcaaaagttgttgatctttcagaccggacactgactattgaggtaaaatccatggtgtgttgtatcttgctgatcgcttacattgccacttgtatgcttttattaaagcaaattatgcgctctgttttttgagt

SEQ ID NO: 1783 - DNA, 487 bp, Lolium multiflorum
atgtagttccaggctatttttcaatgaaaccatactacttcccagagtcttgctgttggccgagctgaaaaggaaggcatttcacgtattacaacagttgttcccggaactgatgaatccatcgagaagttagttcagcagctttacaagcttattgatgtacttaaggtaaatggcatgcaatttcttagggcaatcatttacgatataaaatatgttgtgtaatgcaaaacatgtgattgtcccaggttgaggacttgactcacttaccttttgccgaaagagaactgatgcttatcaaggtatctgggaacaccgctgctcggagggagatactagatatcggtcaaatcttccgggcagaatgtctggatctttctgatcacacagttacgttaatggtgagcttctggctttattaggtgttgtttgttattgttgatttagctttaccaactctcaagtgtgctatggtgagtattaaagc

SEQ ID NO: 1784 - DNA, 475 bp, Lolium multiflorum
gttttgttcacatactttgtcaatccttgtgaatgatttccctggagttctcaatgttgtaacgggtatcttttcccgaaggggctacaatatccaggttcgttttccattcgtagatatcttatgttccctcaattagatcactccaggttagtgttgcggttcattgtttacagacgtgcccattactttgacagagtcttgctgttggtccagctgaaaaaataggcacttctcgcatcactactgtcgttcctgggagtgatgaatctatcgccaagctaatacatcagctttacaagctcattgacgtttatgaggtcaacttattaatgttgtggtttgcatgattttttgttgcctatgtaaggttagctcaaattcgccttagtttttcaggtccaagatcttacacatttaccgtttactgctagagagttaatgatcatcaaggtcgctgggaacacctcagctt

SEQ ID NO: 1785 - DNA, 373 bp, Lolium multiflorum
cgtggcaggtgatggggttggttgacattttcagagcaaaagtggttgatctttcagaccggacactgactattgaggtaaaatccatggtgtgttgtatcttgctgctcgcttacattatcacttgtatgcttttattaaaccaaagtatgctctctgttttttgagtcattccaaaggtaactggagatcctggaaaaatggtagctgtacagaggaacctgagcaaatttgggatcaaagaagttactagaggtggtaaggttataattcttgagaaaatattagaaacttattcggcttttgttcttggctagatctaatgggccttattaatgtgtagatagctttgcggcgtgagaaaatgggacaa

SEQ ID NO: 1786 - DNA, 343 bp, Lolium multiflorum
atgtgcactaaattgcaatttaaatccccatttcgaaaataactggcacacttttctttcttcagcctacagggttttgttcacatactttgtcaatccttgtgaatgatttccctggagttctcaatgttgtaacgggtatcttttcccgaaggggctacaatatccaggtttgttttccatttgtagatatcttatgttccctcaattaaatcaccccgggttagtgttgcggttcattgttaacagacgtgtccattactttgacagagtcttgctgttggtccagctgaaaaaataggcacttctcgcatcactactgttgttcctgggagtgatgaat

SEQ ID NO: 1787 - DNA, 332 bp, Lolium multiflorum
ctttacaagctcatcgacgtttatgaggttaacttattaatgttgtggtttgcattattgttgttgcctatgtaaggttagctcaaattcgccttggtttttcaggtccaagatcttacacatttaccgtttactgctagagagttaatgatcatcaaggtcgctgggaacacctcagctcgcagggctatcctggatattgctgaggatgttttcggggccaaaacggttgatgtatctgaccacacaataactcttcaggtattaattacttttaaccttttgtgcagaactattggatttaggacatctatatgcttttcttggtagga

SEQ ID NO: 1788 - DNA, 285 bp, Lolium multiflorum
ggtcatgcttgtagctaatgtgttcagagcgaaagttgttgatatttccgagaattctctaaccctagaggtaaaaacttggcttcaaacagtattataaggactagggtgttccgtgtctatgctggattaaatttcttgatgctgatctggctaatgctgcaggtcactggagatcctggaaagattgttgcggcacaaaggagcctaagcaaatttgggatcgaagaaatttgtagaacgggaaaagtatttttctggaccatttgctacgtacatgcatgg

SEQ ID NO: 1789 - DNA, 200 bp, Abutilon theophrasti
catggcggctctctcgactcctcgcctaccagttcactgcttgaagcccgagtcagactcagctcggagacccatttctttccctgtaaagatacgaagacccatcagccatgtccccaagaaactcgtgctttctcccaggagcgtcgacgataagatctctggcaacaacatcctttccaacggccccgttccttcaa

SEQ ID NO: 1790 - DNA, 200 bp, Abutilon theophrasti
ttgaaggaacggggccgttggaaaggatgttgttgccagagatcttatcgtcgacgctcctgggagaaagcacgagtttcttggggacatggctgatgggtcttcgtatctttacagggaaagaaatgggtctccgagctgagtctgactcgggcttcaagcagtgaactggtaggcgaggagtcgagagagccgccatg

SEQ ID NO: 1791 - DNA, 200 bp, Abutilon theophrasti
ctttccaacggccccgttccttcaactcccactcgttcaaaggtgagaaggcatacgatttctgtgtttgttggagatgaaagtggaatgatcaataggattgctggagtttttgcaaggagagggtataacattgagtcccttgcggttggtttgaacaaagataaggcactcttcaccatagttgtctctggtactga

SEQ ID NO: 1792 - DNA, 200 bp, Abutilon theophrasti
tcagtaccagagacaactatggtgaagagtgccttatctttgttcaaaccaaccgcaagggactcaatgttataccctctccttgcaaaaactccagcaatcctattgatcattccactttcatctccaacaaacacagaaatcgtatgccttctcacctttgaacgagtgggagttgaaggaacggggccgttggaaag

SEQ ID NO: 1793 - DNA, 200 bp, Abutilon theophrasti
tcaccatagttgtctctggtactgaaagagtgcttcagcaagttgtggagcagttacaaaagcttgtgaatgtttggaaggttgaagatctctctaatgagcctcaggttgaacgtgagcttatgctgataaaagtgaatgcggatccaaagtttagagctgagatcatgtggttagtggacatcttcagggcaaagatt

SEQ ID NO: 1794 - DNA, 200 bp, Abutilon theophrasti
aatctttgccctgaagatgtccactaaccacatgatctcagctctaaactttggatccgcattcacttttatcagcataagctcacgttcaacctgaggctcattagagagatcttcaaccttccaaacattcacaagcttttgtaactgctccacaacttgctgaagcactctttcagtaccagagacaactatggtga

SEQ ID NO: 1795 - DNA, 200 bp, Abutilon theophrasti
agtggacatcttcagggcaaagattgtggacatctcagaacactcactaactattgaggtaacaggagatcctgggaagatggttgctgtgcaaagaaatttaagcaagtttgggatcaaagaaattgctagaacaggaaagattgcccttagaagggaaaaaatgggtgcatctgctccattctggcaattttcagcag

SEQ ID NO: 1796 - DNA, 200 bp, Abutilon theophrasti
ctgctgaaaattgccagaatggagcagatgcacccattttttcccttctaagggcaatctttcctgttctagcaatttctttgatcccaaacttgcttaaatttctttgcacagcaaccatcttcccaggatctcctgttacctcaatagttagtgagtgttctgagatgtccacaatctttgccctgaagatgtccact

SEQ ID NO: 1797 - DNA, 200 bp, Abutilon theophrasti
gctccattctggcaattttcagcagcttcatatcctgatcttgaagaaacaatacctgataacactcttgcaggggccagagatagaacagtagttagcgaggctgatgtttctggagggggggatgtttatccagtggagtcacctgatggttttacgatcaatcaagttcttgatgctcattggggtgttctcgttga

SEQ ID NO: 1798 - DNA, 200 bp, Abutilon theophrasti
tcaacgagaacaccccaatgagcatcaagaacttgattgatcgtaaaaccatcaggtgactccactggataaacatccccccctccagaaacatcagcctcgctaactactgttctatctctggcccctgcaagagtgttatcaggtattgtttcttcaagatcaggatatgaagctgctgaaaattgccagaatggagc

SEQ ID NO: 1799 - DNA, 200 bp, Abutilon theophrasti
atgctcattggggtgttctcgttgatgatacaagtggacatcaatctcatactttatccatgcttgtaaatgactgtccgggagttctaaaccttgtcacaggtgttttcgctcgaagaggctataatcttcagagtttggctgttggacatgcagaagttgaggggcgctctcgcattaccactgttgttccgggtaca

SEQ ID NO: 1800 - DNA, 200 bp, Abutilon theophrasti
tgtacccggaacaacagtggtaatgcgagagcgcccctcaacttctgcatgtccaacagccaaactctgaagattatagcctcttcgagcgaaaacacctgtgacaaggtttagaactcccggacagtcatttacaagcatggataaagtatgagattgatgtccacttgtatcatcaacgagaacaccccaatgagcat

SEQ ID NO: 1801 - DNA, 200 bp, Abutilon theophrasti
cattaccactgttgttccgggtacagatgaatcaattagcaagttagtgcagcaactatataagctcgtagatatgcatgaggtacaagatcttacacccctgccatttgctgaacgagaattaatgttgataaagattgccgtgaatgccgctgctcggcgagatgtccttgacattgccaccatttttagggccaagg

SEQ ID NO: 1802 - DNA, 200 bp, Abutilon theophrasti
ccttggccctaaaaatggtggcaatgtcaaggacatctcgccgagcagcggcattcacggcaatctttatcaacattaattctcgttcagcaaatggcaggggtgtaagatcttgtacctcatgcatatctacgagcttatatagttgctgcactaacttgctaattgattcatctgtacccggaacaacagtggtaatg

SEQ ID NO: 1803 - DNA, 200 bp, Abutilon theophrasti
attgccaccatttttagggccaaggctgttgatgtttcggaccacactgtcactctcgagcttacaggagatctagacaagatggttgcgctgcagagattgttggagccttatggtatttgtgaggttgctcgaactggacgtgtagcgttggtgagagagtctggtgtcgactccaaatatctacgaggatattcttt

SEQ ID NO: 1804 - DNA, 200 bp, Abutilon theophrasti
aaagaatatcctcgtagatatttggagtcgacaccagactctctcaccaacgctacacgtccagttcgagcaacctcacaaataccataaggctccaacaatctctgcagcgcaaccatcttgtctagatctcctgtaagctcgagagtgacagtgtggtccgaaacatcaacagccttggccctaaaaatggtggcaat

SEQ ID NO: 1805 - DNA, 200 bp, Amaranthus graecizans
actcgctgttggattgaacaaggacaaagctctctttactattgtagtttctggaacggataatgtgttgcagcaagtgatggaacaacttcaaaagcttgtcaatgttttgaaggttgaagatatatccaaggagcctcaagtagaacgtgaattgatgcttgtaaaagttggagctgatcggaataaccgtgctgagt

SEQ ID NO: 1806 - DNA, 200 bp, Amaranthus graecizans
actcagcacggttattccgatcagctccaacttttacaagcatcaattcacgttctacttgaggctccttggatatatcttcaaccttcaaaacattgacaagcttttgaagttgttccatcacttgctgcaacacattatccgttccagaaactacaatagtaaagagagctttgtccttgttcaatccaacagcgagt

SEQ ID NO: 1807 - DNA, 200 bp, Amaranthus graecizans
gctgatcggaataaccgtgctgagttgatgtggttggtgggcatctttcgtgccaaaatagtggacatatcggaagagtatctttcaatagaggtcactggagatccaggaaagatggttgctgtcctcagaaacctaagcaagtttggcatcaaagaaattgctcgtaccggaaagattgctctaagaagggaaaaatt

SEQ ID NO: 1808 - DNA, 200 bp, Amaranthus graecizans
aatttttcccttcttagagcaatctttccggtacgagcaatttctttgatgccaaacttgcttaggtttctgaggacagcaaccatctttcctggatctccagtgacctctattgaaagatactcttccgatatgtccactattttggcacgaaagatgcccaccaaccacatcaactcagcacggttattccgatcagc

SEQ ID NO: 1809 - DNA, 200 bp, Amaranthus graecizans
agattgctctaagaagggaaaaattgggtgagtctgctcctttctggcgtttttctgctgcttcttatcctgatcttgaagaagctatccctatggatgctctttctggagtttcaaaaagagcagctgctgctggatcatcagattcgtctgtggagggtgatgtttatcctgtggagccgtttgatggtttctcccct

SEQ ID NO: 1810 - DNA, 200 bp, Amaranthus graecizans
aggggagaaaccatcaaacggctccacaggataaacatcaccctccacagacgaatctgatgatccagcagcagctgctctttttgaaactccagaaagagcatccatagggatagcttcttcaagatcaggataagaagcagcagaaaaacgccagaaaggagcagactcacccaatttttcccttcttagagcaatct

SEQ ID NO: 1811 - DNA, 200 bp, Amaranthus hybridus
aaagaaattgcaaggaccggtaagattgctctaaggcgagaaagatgggtcagacggctcctttttggagattctctgctgcttcttatccagatctacaagaaaaggctgttgatgatctggccaggcctacgaaacggagcatcaatggtgattctggctcatcttcaagtggtgatgtttatccggtggaaccttat

SEQ ID NO: 1812 - DNA, 200 bp, Amaranthus hybridus
ataaggttccaccggataaacatcaccacttgaagatgagccagaatcaccattgatgctccgtttcgtaggcctggccagatcatcaacagccttttcttgtagatctggataagaagcagcagagaatctccaaaaaggagccgtctgacccatctttctcgccttagagcaatcttaccggtccttgcaatttcttt

SEQ ID NO: 1813 - DNA, 200 bp, Amaranthus hybridus
tgatgtttatccggtggaaccttatgatggttcgatggtaaatcaagtacttgatgctcactggggcgtactttatgacggtgattccagtggtctccggtcacatacgctgtccatgctggtaaataatgctcccggagttcttaacactgttacaggagtaatttctcgtaggggttataacattcagagtcttgctg

SEQ ID NO: 1814 - DNA, 200 bp, Amaranthus hybridus
cagcaagactctgaatgttataacccctacgagaaattactcctgtaacagtgttaagaactccgggagcattatttaccagcatggacagcgtatgtgaccggagaccactggaatcaccgtcataaagtacgccccagtgagcatcaagtacttgatttaccatcgaaccatcataaggttccaccggataaacatca

SEQ ID NO: 1815 - DNA, 200 bp, Amaranthus hybridus
gtgtcgactcacctttcaacgagttttaactccattccgaaaagcaatagattgaaccaccaaactgcaaacgattagggttctccttgaaaccccattctctgggttttaagtttaactccaatagtgacaggaattcggagtttgataaactggttgtatctgcaagcaatgttgatcaactgggaaatcaaagtaac

SEQ ID NO: 1816 - DNA, 200 bp, Amaranthus hybridus
gttactttgatttcccagttgatcaacattgcttgcagatacaaccagtttatcaaactccgaattcctgtcactattggagttaaacttaaaacccagagaatggggtttcaaggagaaccctaatcgtttgcagtttggtggttcaatctattgcttttcggaatggagttaaaactcgttgaaaggtgagtcgacac

SEQ ID NO: 1817 - DNA, 200 bp, Amaranthus hybridus
tgatcaactgggaaatcaaagtaacttatcctttaatcccccttctccctctcgatcaaaggagagacgacatacaatatcagtatttgtgggggatgaaagtggaatgattaatcgaatagcaggggtttttgccagaagaggttataatatcgaatcactcgctgttggattgaacaaggacaaagctctcttcacta

SEQ ID NO: 1818 - DNA, 200 bp, Amaranthus hybridus
tagtgaagagagctttgtccttgttcaatccaacagcgagtgattcgatattataacctcttctggcaaaaacccctgctattcgattaatcattccactttcatcccccacaaatactgatattgtatgtcgtctctcctttgatcgagagggagaagggggattaaaggataagttactttgatttcccagttgatca

SEQ ID NO: 1819 - DNA, 200 bp, Amaranthus hybridus
aacaaggacaaagctctcttcactattgtagtttctggaacggataatgtgttgcagcaagtgatggaacagcttcaaaagcttgtcaatgttttgaaggttgaagatatatccaaggagcctcaagtagaacgtgaattgatgcttgtaaaagttggagctgatcggaataaccgtgctgagctgatgtggttggtgga

SEQ ID NO: 1820 - DNA, 200 bp, Amaranthus hybridus
tccaccaaccacatcagctcagcacggttattccgatcagctccaacttttacaagcatcaattcacgttctacttgaggctccttggatatatcttcaaccttcaaaacattgacaagcttttgaagctgttccatcacttgctgcaacacattatccgttccagaaactacaatagtgaagagagctttgtccttgtt

SEQ ID NO: 1821 - DNA, 200 bp, Amaranthus lividus
ctggaaatgacgagtcgattggaaaattagttcagcaatttaacaagttagtagaccttcatgagattcaagaccttactcaccagccatttcagagcgagagcttatgttgatcaaaatagctgcaaatactacagccaggagagatgtccttgatattgctaatattttccgtgcaaaagctgtggatgtttctgatc

SEQ ID NO: 1822 - DNA, 200 bp, Amaranthus lividus
gatcagaaacatccacagcttttgcacggaaaatattagcaatatcaaggacatctctcctggctgtagtatttgcagctattttgatcaacataagctctcgctctgaaatggctggtgagtaaggtcttgaatctcatgaaggtctactaacttgttaaattgctgaactaattttccaatcgactcgtcatttccag

SEQ ID NO: 1823 - DNA, 200 bp, Amaranthus lividus
gcaaaagctgtggatgtttctgatcatacaataacattacaacttgctggtgatttagacaaaatggttgcgctacagagattattggagccttacggcatttgtgaggtggcacggactggaagagtagcactaacgagagagtctagggtagattccaaatatctacgaggatacactcttccgttgtatgaatgaaa

SEQ ID NO: 1824 - DNA, 200 bp, Amaranthus lividus
tttcattcatacaacggaagagtgtatcctcgtagatatttggaatctaccctagactctctcgttagtgctactcttccagtccgtgccacctcacaaatgccgtaaggctccaataatctctgtagcgcaaccattttgtctaaatcaccagcaagttgtaatgttattgtatgatcagaaacatccacagcttttgc

SEQ ID NO: 1825 - DNA, 200 bp, Amaranthus lividus
acactcttccgttgtatgaatgaaaaactccagctatgtctttccgacattaccttgtctgattccttccgctcttctacactgcattgcaagcagaacaattgcccacaagtggagtaaattaaaaggggaaacaacaataccgatctttgctttgaagatatactgatttgtataacaatagagtttgtatttgacta

SEQ ID NO: 1826 - DNA, 200 bp, Amaranthus lividus
tagtcaaatacaaactctattgttatacaaatcagtatatcttcaaagcaaagatcggtattgttgtttccccttttaatttactccacttgtgggcaattgttctgcttgcaatgcagtgtagaagagcggaaggaatcagacaaggtaatgtcggaaagacatagctggagtttttcattcatacaacggaagagtgt

SEQ ID NO: 1827 - DNA, 200 bp, Amaranthus lividus
gcaatagattgaaccaccaaactgcaaaacgattagggttctccttgaaaccccattctctgggttttaagtttaactccaatagtgacaggaattcggagtttgataaactggttgtgtctgcaagcaatgttgatcaactgggaaatcaaagtaacttatcctttaatcccccttctccctctcgatcaaaggagaga

SEQ ID NO: 1828 - DNA, 200 bp, Amaranthus lividus
tctctcctttgatcgagagggagaagggggattaaaggataagttactttgatttcccagttgatcaacattgcttgcagacacaaccagtttatcaaactccgaattcctgtcactattggagttaaacttaaaacccagagaatggggtttcaaggagaaccctaatcgttttgcagtttggtggttcaatctattgc

SEQ ID NO: 1829 - DNA, 200 bp, Amaranthus lividus
ttctccctctcgatcaaaggagagacgacatacaatatcagtatttgtgggggatgaaagtggaatgattaatcgaatagcaggggtttttgccagaagaggttataatatcgaatcactcgctgttggattgaacaaggacaaagctctcttcactattgtagtttctggaacggataatgtgttgcagcaagtgatgg

SEQ ID NO: 1830 - DNA, 200 bp, Amaranthus lividus
ccatcacttgctgcaacacattatccgttccagaaactacaatagtgaagagagctttgtccttgttcaatccaacagcgagtgattcgatattataacctcttctggcaaaaacccctgctattcgattaatcattccactttcatcccccacaaatactgatattgtatgtcgtctctcctttgatcgagagggagaa

SEQ ID NO: 1831 - DNA, 200 bp, Amaranthus lividus
gataatgtgttgcagcaagtgatggaacagcttcaaaagcttgtcaatgttttgaaggttgaagatatatccaaggagcctcaagtagaacgtgaattgatgcttgtaaaagttggagctgatcggaataaccgtgctgagctgatgtggttggtggacatctttcgtgccaaaattgtggacatatcggaagagtatct

SEQ ID NO: 1832 - DNA, 200 bp, Amaranthus lividus
agatactcttccgatatgtccacaattttggcacgaaagatgtccaccaaccacatcagctcagcacggttattccgatcagctccaacttttacaagcatcaattcacgttctacttgaggctccttggatatatcttcaaccttcaaaacattgacaagcttttgaagctgttccatcacttgctgcaacacattatc

SEQ ID NO: 1833 - DNA, 200 bp, Amaranthus lividus
ttgtggacatatcggaagagtatctttcaatagaggtcactggagatccaggaaagatggttgctgtccttagaaacctaagcaagtttggcatcaaagaaattgctcgtaccggaaagattgctctaagaagggaaaaattgggcgagtctgctcctttctggcgtttttctgctgtttcttatcctgatcttgaagaa

SEQ ID NO: 1834 - DNA, 200 bp, Amaranthus lividus
ttcttcaagatcaggataagaaacagcagaaaaacgccagaaaggagcagactcgcccaatttttcccttcttagagcaatctttccggtacgagcaatttctttgatgccaaacttgcttaggtttctaaggacagcaaccatctttcctggatctccagtgacctctattgaaagatactcttccgatatgtccacaa

SEQ ID NO: 1835 - DNA, 200 bp, Amaranthus lividus
tgtttcttatcctgatcttgaagaagctatccctatggatgctctttctggagtttcaaaaggggcagctgctgctggatcatcggatttgtctgtggagggtgatgtttatcctgtggagccgtttgatggtttctcccttccaatcttagatgctcattggggtattttgaacgaagaagatactagtgggatgcggt

SEQ ID NO: 1836 - DNA, 200 bp, Amaranthus lividus
accgcatcccactagtatcttcttcgttcaaaataccccaatgagcatctaagattggaagggagaaaccatcaaacggctccacaggataaacatcaccctccacagacaaatccgatgatccagcagcagctgccccttttgaaactccagaaagagcatccatagggatagcttcttcaagatcaggataagaaaca

SEQ ID NO: 1837 - DNA, 200 bp, Amaranthus lividus
gaagaagatactagtgggatgcggtcacacactctatctattcttgttaatgacaaacctggggtccttaatgttgttacgggggtttttgctcgaaggggttataacattcagagtttagctgtgggtcatgcggaaggtgagggtctatctcgtatcactactgttgtacccggtacagatgaatcaattagcaaatt

SEQ ID NO: 1838 - DNA, 200 bp, Amaranthus lividus
aatttgctaattgattcatctgtaccgggtacaacagtagtgatacgagatagaccctcaccttccgcatgacccacagctaaactctgaatgttataaccccttcgagcaaaaacccccgtaacaacattaaggaccccaggtttgtcattaacaagaatagatagagtgtgtgaccgcatcccactagtatcttcttc

SEQ ID NO: 1839 - DNA, 200 bp, Amaranthus lividus
gtacagatgaatcaattagcaaattggttcaacaaatctacaagctggttgatattcatgaggttagagatcttacccattatccatttgctgagcgagagttgatgttgataaaagtagctgtgaatactgctgcacgtcgtgaggtcctagacgttgccagcatttttagagcaaaagctgttgatgtatctgatcac

SEQ ID NO: 1840 - DNA, 200 bp, Amaranthus lividus
gtgatcagatacatcaacagcttttgctctaaaaatgctggcaacgtctaggacctcacgacgtgcagcagtattcacagctacttttatcaacatcaactctcgctcagcaaatggataatgggtaagatctctaacctcatgaatatcaaccagcttgtagatttgttgaaccaatttgctaattgattcatctgtac

SEQ ID NO: 1841 - DNA, 200 bp, Amaranthus lividus
ttcatttgtttctcatctctctccaatggcggccatttcctttaacatcaatggcggaaagattggaactttatgtccaaaacctaaatatggttgtgcgtttttgagaaaatgggattttggagctcatacaactgtatatactaaacccatgtcaaaaatttcaagcctgaaagcagttgaagtttctaccaatgcta

SEQ ID NO: 1842 - DNA, 200 bp, Amaranthus lividus
tagcattggtagaaacttcaactgctttcaggcttgaaatttttgacatgggtttagtatatacagttgtatgagctccaaaatcccattttctcaaaaacgcacaaccatatttaggttttggacataaagttccaatctttccgccattgatgttaaaggaaatggccgccattggagagagatgagaaacaaatgaa

SEQ ID NO: 1843 - DNA, 200 bp, Amaranthus lividus
gcagttgaagtttctaccaatgctacagaaaacgcagtttctctttcagctaactctagggtgatgcatcacacaatttctgtctttgtcggggatgaaagtggaataatcaataggattgcaggtgttatttctagaagaggatataatatcgagtctttggctgtttgtttaaacaaggataaggctctttttactat

SEQ ID NO: 1844 - DNA, 200 bp, Amaranthus lividus
atagtaaaaagagccttatccttgtttaaacaaacagccaaagactcgatattatatcctcttctagaaataacacctgcaatcctattgattattccactttcatccccgacaaagacagaaattgtgtgatgcatcaccctagagttagctgaaagagaaactgcgttttctgtagcattggtagaaacttcaactgc

SEQ ID NO: 1845 - DNA, 200 bp, Amaranthus palmeri
aaattagttggttaaaaaaactttttgctaaaacaaaatgtacttttctaatactcctatctaaaaccccaactaatactagtgtgtcttcctttgcaccccggttgtcctcgtcaggccgagttagctgtgtttcaaatttccatccatggaggctgtgtcgactcacctttcaacgagttttaactccattccgaaaa

SEQ ID NO: 1846 - DNA, 200 bp, Amaranthus palmeri
ttttcggaatggagttaaaactcgttgaaaggtgagtcgacacagcctccatggatggaaatttgaaacacagctaactcggcctgacgaggacaaccggggtgcaaaggaagacacactagtattagttggggttttagataggagtattagaaaagtacattttgttttagcaaaaagtttttttaaccaactaattt

SEQ ID NO: 1847 - DNA, 200 bp, Amaranthus palmeri
acgagttttaactccattccgaaaagcaatagactgaaccaccaaactgcaaaacgattagggttctccttgaaaccccattcgctaggttttaagtttaactccaatagtgacaggaattcggagtttgataaactggttgtatctgcaagcaatgttgatcaactgggaaatcaaagtaacttatcctttaatccccc

SEQ ID NO: 1848 - DNA, 200 bp, Amaranthus palmeri
gggggattaaaggataagttactttgatttcccagttgatcaacattgcttgcagatacaaccagtttatcaaactccgaattcctgtcactattggagttaaacttaaaacctagcgaatggggtttcaaggagaaccctaatcgttttgcagtttggtggttcagtctattgcttttcggaatggagttaaaactcgt

SEQ ID NO: 1849 - DNA, 200 bp, Amaranthus palmeri
aaagtaacttatcctttaatcccccttcttcctctcgatcaaagtacgttatttttcccttttttgattaattttcacaatgtataatttaggtttggcttgttgttttatcttctactagttaattttgcttttcattaattattgaattttgaaatgaaaatgagtgattatttgatttatgagcaattgttgtcact

SEQ ID NO: 1850 - DNA, 200 bp, Amaranthus palmeri
agtgacaacaattgctcataaatcaaataatcactcattttcatttcaaaattcaataattaatgaaaagcaaaattaactagtagaagataaaacaacaagccaaacctaaattatacattgtgaaaattaatcaaaaaagggaaaaataacgtactttgatcgagaggaagaagggggattaaaggataagttacttt

SEQ ID NO: 1851 - DNA, 200 bp, Amaranthus palmeri
tgatttatgagcaattgttgtcactcgtgccagcctgaaggattgggaaaattagtcaattatgaatctggtatatttttcattgatttatgtgttctgttgcttcttgcatgtaatttgttcttccgtttgatttttatacaagacagcgtgcaaattttagcatgttttcagttctgaaattgatcacagcctgtatt

SEQ ID NO: 1852 - DNA, 200 bp, Amaranthus palmeri
aatacaggctgtgatcaatttcagaactgaaaacatgctaaaatttgcacgctgtcttgtataaaaatcaaacggaagaacaaattacatgcaagaagcaacagaacacataaatcaatgaaaaatataccagattcataattgactaattttcccaatccttcaggctggcacgagtgacaacaattgctcataaatca

SEQ ID NO: 1853 - DNA, 200 bp, Amaranthus palmeri
tctgaaattgatcacagcctgtatttttttagtctaaattataacgactcattaaatcattttttttatttggtgaagatgtttatgatctttgctacaaagatttaatcggaactaatttctagttattatcactaataagggtaagatcgtatacattagactccaaaccccggccgtaatagaattggggtaatgat

SEQ ID NO: 1854 - DNA, 200 bp, Amaranthus palmeri
atcattaccccaattctattacggccggggtttggagtctaatgtatacgatcttacccttattagtgataataactagaaattagttccgattaaatctttgtagcaaagatcataaacatcttcaccaaataaaaaaaatgatttaatgagtcgttataatttagactaaaaaaatacaggctgtgatcaatttcaga

SEQ ID NO: 1855 - DNA, 200 bp, Amaranthus palmeri
gccgtaatagaattggggtaatgattaaggtaatgaaatgttgttgcctgtatttttgtaatgaattccaaacaggctgttaaatatagatactttccctgtaaaaatacaagagtttataaggctcttattcaacccaacataagtttattgaaagatttattagtagtctttttgtgattcgtaaccttgtaattacc

SEQ ID NO: 1856 - DNA, 200 bp, Amaranthus palmeri
ggtaattacaaggttacgaatcacaaaaagactactaataaatctttcaataaacttatgttgggttgaataagagccttataaactcttgtatttttacagggaaagtatctatatttaacagcctgtttggaattcattacaaaaatacaggcaacaacatttcattaccttaatcattaccccaattctattacggc

SEQ ID NO: 1857 - DNA, 200 bp, Amaranthus palmeri
tgtgattcgtaaccttgtaattaccaagtacagctctttatttctatgacattgaaaccgtctgcaatcaaattgacctagtgctaaaagctgcttgatttgcttattgccttaagtgaaaatttatagcaagtgttttggaggaagaaaagaaaaagatcgatatgctttcatgtcttcagaaaactagttccgaaagt

SEQ ID NO: 1858 - DNA, 200 bp, Amaranthus palmeri
actttcggaactagttttctgaagacatgaaagcatatcgatctttttcttttcttcctccaaaacacttgctataaattttcacttaaggcaataagcaaatcaagcagcttttagcactaggtcaatttgattgcagacggtttcaatgtcatagaaataaagagctgtacttggtaattacaaggttacgaatcaca

SEQ ID NO: 1859 - DNA, 200 bp, Amaranthus palmeri
tcttcagaaaactagttccgaaagttgtggagtacaatagagttcaactattgcgcatgtaaaatattaatctcaagtaattctgatagaagaccatctgggaagatttaattagtgctaatctgggaggaattattaagattagtcagtaatctggcaacatttatctaggaggatagaaaaggcattgaccgtatgta

SEQ ID NO: 1860 - DNA, 200 bp, Amaranthus palmeri
tacatacggtcaatgccttttctatcctcctagataaatgttgccagattactgactaatcttaataattcctcccagattagcactaattaaatcttcccagatggtcttctatcagaattacttgagattaatattttacatgcgcaatagttgaactctattgtactccacaactttcggaactagttttctgaaga

SEQ ID NO: 1861 - DNA, 200 bp, Amaranthus palmeri
atagaaaaggcattgaccgtatgtagtaatattagtgcatgggaagttcacgtgcagttggaagacacttttccgttataaagggtcattatgaaatagtggacacgtgttagtaggagaagctaagagcgccatagaaaataaaggaaaaaccattaaagtaattaagggctgaaacgtccaaaacaagcacagtggcc

SEQ ID NO: 1862 - DNA, 200 bp, Amaranthus palmeri
ggccactgtgcttgttttggacgtttcagcccttaattactttaatggtttttcctttattttctatggcgctcttagcttctcctactaacacgtgtccactatttcataatgaccctttataacggaaaagtgtcttccaactgcacgtgaacttcccatgcactaatattactacatacggtcaatgccttttctat

SEQ ID NO: 1863 - DNA, 200 bp, Amaranthus palmeri
aacgtccaaaacaagcacagtggcctgtggagaattttggggattaatttctttctcttccaacattataatgtcaatctatgtcatttgtgctaaagtgacacttaatgtaccctatcttccttcgacttaatttaaactatcgtgacttcaactcttatctttattgttataacctagcttctacccattacgcgagt

SEQ ID NO: 1864 - DNA, 200 bp, Amaranthus palmeri
actcgcgtaatgggtagaagctaggttataacaataaagataagagttgaagtcacgatagtttaaattaagtcgaaggaagatagggtacattaagtgtcactttagcacaaatgacatagattgacattataatgttggaagagaaagaaattaatccccaaaattctccacaggccactgtgcttgttttggacgtt

SEQ ID NO: 1865 - DNA, 200 bp, Amaranthus palmeri
cctagcttctacccattacgcgagttcactttcatctacctttatatagcttatcattaatatgttctcataataattcaaaagtttgcatctatctaattttagagctacaagtgttgtttgtagtaattgtgtgtcgttagattgtagtgcgtgaactatctatttttcgtgaactgttgcatttcttgaatgacttg

SEQ ID NO: 1866 - DNA, 200 bp, Amaranthus palmeri
caagtcattcaagaaatgcaacagttcacgaaaaatagatagttcacgcactacaatctaacgacacacaattactacaaacaacacttgtagctctaaaattagatagatgcaaacttttgaattattatgagaacatattaatgataagctatataaaggtagatgaaagtgaactcgcgtaatgggtagaagctagg

SEQ ID NO: 1867 - DNA, 200 bp, Amaranthus palmeri
actgttgcatttcttgaatgacttgtctctagaatgatgctccttaaacttacttcttttgtatcatgtatgtttaagggagagacgacatacaatatcagtatttgtgggggatgaaagtggaatgattaatcgaatagcaggggtttttgccagaagaggttataatatcgaatcactcgctgttggattgaacaagg

SEQ ID NO: 1868 - DNA, 200 bp, Amaranthus palmeri
ccttgttcaatccaacagcgagtgattcgatattataacctcttctggcaaaaacccctgctattcgattaatcattccactttcatcccccacaaatactgatattgtatgtcgtctctcccttaaacatacatgatacaaaagaagtaagtttaaggagcatcattctagagacaagtcattcaagaaatgcaacagt

SEQ ID NO: 1869 - DNA, 200 bp, Amaranthus palmeri
tcactcgctgttggattgaacaaggacaaagctctcttcactattgtagtttccggaacggataatgtgttgcagcaagtgatggaacagcttcaaaagcttgtcaatgttttgaaggttatttttcttttgaataattaccgtggcatccatgtcttcaattgtttagaattctcatcactaagcacaacttgtacatt

SEQ ID NO: 1870 - DNA, 200 bp, Amaranthus palmeri
aatgtacaagttgtgcttagtgatgagaattctaaacaattgaagacatggatgccacggtaattattcaaaagaaaaataaccttcaaaacattgacaagcttttgaagctgttccatcacttgctgcaacacattatccgttccggaaactacaatagtgaagagagctttgtccttgttcaatccaacagcgagtga

SEQ ID NO: 1871 - DNA, 200 bp, Amaranthus palmeri
catcactaagcacaacttgtacatttaggttgaagatatatccaaggagcctcaagtagaacgtgaattgatgcttgtaaaagttggagctgatcggaataaccgtgctgaggtacctaataatatatgtcaaaatacccaactgtacaaaagagttgatcttattagatacaggcagatatattacctacagcctacat

SEQ ID NO: 1872 - DNA, 200 bp, Amaranthus palmeri
atgtaggctgtaggtaatatatctgcctgtatctaataagatcaactcttttgtacagttgggtattttgacatatattattaggtacctcagcacggttattccgatcagctccaacttttacaagcatcaattcacgttctacttgaggctccttggatatatcttcaacctaaatgtacaagttgtgcttagtgatg

SEQ ID NO: 1873 - DNA, 200 bp, Amaranthus palmeri
cagatatattacctacagcctacatctctatgttttttgtggcaactttctgctacatgccgatctttcttagttttctcctagtgaattgtaatttttaatatataatttgttattccactatgtctgttcctgatttactttcgctgatcacatcgttcgtgtttcttctattgtagctgatgtggttggtggacatc

SEQ ID NO: 1874 - DNA, 200 bp, Amaranthus palmeri
gatgtccaccaaccacatcagctacaatagaagaaacacgaacgatgtgatcagcgaaagtaaatcaggaacagacatagtggaataacaaattatatattaaaaattacaattcactaggagaaaactaagaaagatcggcatgtagcagaaagttgccacaaaaaacatagagatgtaggctgtaggtaatatatctg

SEQ ID NO: 1875 - DNA, 200 bp, Amaranthus palmeri
gtagctgatgtggttggtggacatctttcgtgccaaaattgtggacatatcggaagagtatctttcaatagaggtaatcacaggatatttcataaaatcaatgttcattttgggaatattgggaatattgtgacaagtatcaatgttttatgtacaggttaagtgttttatttgcattttccacaagctacttcatcctc

SEQ ID NO: 1876 - DNA, 200 bp, Amaranthus palmeri
gaggatgaagtagcttgtggaaaatgcaaataaaacacttaacctgtacataaaacattgatacttgtcacaatattcccaatattcccaaaatgaacattgattttatgaaatatcctgtgattacctctattgaaagatactcttccgatatgtccacaattttggcacgaaagatgtccaccaaccacatcagctac

SEQ ID NO: 1877 - DNA, 200 bp, Amaranthus palmeri
attttccacaagctacttcatcctcttctccgaagatgtgtaaaattgtaatatacatattcacaccaaatttaaaattttggaagagcgacatacaaatgatttatgacctaattttgctgtatatatacatgcttatattttcttcaaaccgctttagaaaatttattatatttttcctccttcaaagaaaacaagtt

SEQ ID NO: 1878 - DNA, 200 bp, Amaranthus palmeri
aacttgttttctttgaaggaggaaaaatataataaattttctaaagcggtttgaagaaaatataagcatgtatatatacagcaaaattaggtcataaatcatttgtatgtcgctcttccaaaattttaaatttggtgtgaatatgtatattacaattttacacatcttcggagaagaggatgaagtagcttgtggaaaat

SEQ ID NO: 1879 - DNA, 200 bp, Amaranthus palmeri
tttcctccttcaaagaaaacaagttttgtgagataaaagctacatgtttagtaaacaaatttagtgaagactgatgaaaacaaaatttgtacttttgaatggttttatatattttatgatctttgtaagctaatatggaaactataagattgtagttggttttctttagctcttttcgcttttacctttcatttttttta

SEQ ID NO: 1880 - DNA, 200 bp, Amaranthus palmeri
taaaaaaaatgaaaggtaaaagcgaaaagagctaaagaaaaccaactacaatcttatagtttccatattagcttacaaagatcataaaatatataaaaccattcaaaagtacaaattttgttttcatcagtcttcactaaatttgtttactaaacatgtagcttttatctcacaaaacttgttttctttgaaggaggaaa

SEQ ID NO: 1881 - DNA, 200 bp, Amaranthus palmeri
tcgcttttacctttcattttttttacatgcttaaaaaagcgactcacctagtactttgatatccaggtcactggagatccaggaaagatggttgctgtccttagaaacctaagcaagtttggcatcaaagaaattgctcgtaccggaaaggtttactatttttttttgtaaatttttcatcgttgttaaagagatctttt

SEQ ID NO: 1882 - DNA, 200 bp, Amaranthus palmeri
aaaagatctctttaacaacgatgaaaaatttacaaaaaaaaatagtaaacctttccggtacgagcaatttctttgatgccaaacttgcttaggtttctaaggacagcaaccatctttcctggatctccagtgacctggatatcaaagtactaggtgagtcgcttttttaagcatgtaaaaaaaatgaaaggtaaaagcga

SEQ ID NO: 1883 - DNA, 200 bp, Amaranthus palmeri
ttcatcgttgttaaagagatcttttagtttccacattgcataataaatgtgaatgccttttgtttattgcttgtccaggttttttatatttttttaagatgtaaagtttaatatctaacagattgctctaagaagggaaaaattgggcgagtctgctcctttctggcgtttttctgctgcttcttatcctgatcttgaag

SEQ ID NO: 1884 - DNA, 200 bp, Amaranthus palmeri
cttcaagatcaggataagaagcagcagaaaaacgccagaaaggagcagactcgcccaatttttcccttcttagagcaatctgttagatattaaactttacatcttaaaaaaatataaaaaacctggacaagcaataaacaaaaggcattcacatttattatgcaatgtggaaactaaaagatctctttaacaacgatgaa

SEQ ID NO: 1885 - DNA, 200 bp, Amaranthus palmeri
gctgcttcttatcctgatcttgaagaagctatccctatggattctctttctggagttgcaaaagcagcaactgctgctggatcatcggattcgtctgtggaggtgtgtttcttatttgtccaaaattaagtgtccaagtgtcgtgcccaagtccgaatatcgaggatcagacatgggtacttgagttaaaatgaagagtc

SEQ ID NO: 1886 - DNA, 200 bp, Amaranthus palmeri
gactcttcattttaactcaagtacccatgtctgatcctcgatattcggacttgggcacgacacttggacacttaattttggacaaataagaaacacacctccacagacgaatccgatgatccagcagcagttgctgcttttgcaactccagaaagagaatccatagggatagcttcttcaagatcaggataagaagcagc

SEQ ID NO: 1887 - DNA, 200 bp, Amaranthus palmeri
ggtacttgagttaaaatgaagagtccgggtaacaaatgtaattgattaaaaaacatatagttgccggattttaaatttttttttaaggtagttggaaaaatttccttttattagaaaaactttgggaggacaatatttttgtgaatgtgtccgagtgcctcttatgttaaagggcctcaagacgaataggaaatggcagg

SEQ ID NO: 1888 - DNA, 200 bp, Amaranthus palmeri
cctgccatttcctattcgtcttgaggccctttaacataagaggcactcggacacattcacaaaaatattgtcctcccaaagtttttctaataaaaggaaatttttccaactaccttaaaaaaaaatttaaaatccggcaactatatgttttttaatcaattacatttgttacccggactcttcattttaactcaagtacc

SEQ ID NO: 1889 - DNA, 200 bp, Amaranthus palmeri
ctcaagacgaataggaaatggcaggcgggtcgaatgcgggtgtgcaggatggttgctggcaatgtttccgcaggctgttgttggtgtgcttttcacttcagtagcaatttacagcaaattagtagcaaatttacatcaaatttacagcagattgttagctcaataacccatcatgacataaatattaatgtataacataa

SEQ ID NO: 1890 - DNA, 200 bp, Amaranthus palmeri
ttatgttatacattaatatttatgtcatgatgggttattgagctaacaatctgctgtaaatttgatgtaaatttgctactaatttgctgtaaattgctactgaagtgaaaagcacaccaacaacagcctgcggaaacattgccagcaaccatcctgcacacccgcattcgacccgcctgccatttcctattcgtcttgag

SEQ ID NO: 1891 - DNA, 200 bp, Amaranthus palmeri
acataaatattaatgtataacataactttaactacaaaatacaatttagaatcatcaaatcacaatttagttgtttaatatacattaaaatatttctttgtaggaacttcaattctatctcttagtagcataaattttacaatcaaacgcaacaaaagtattaagttagaaagggagtactgcatgtggattgtctcagc

SEQ ID NO: 1892 - DNA, 200 bp, Amaranthus palmeri
gctgagacaatccacatgcagtactccctttctaacttaatacttttgttgcgtttgattgtaaaatttatgctactaagagatagaattgaagttcctacaaagaaatattttaatgtatattaaacaactaaattgtgatttgatgattctaaattgtattttgtagttaaagttatgttatacattaatatttatgt

SEQ ID NO: 1893 - DNA, 200 bp, Amaranthus palmeri
agtactgcatgtggattgtctcagcaagtgctgcagcagctttgcactatctagtgagacattggaaatgattaggagctttgggataaatatgcgcagaaacacttctcttcttgccatcccaaggatactgcagcttcaggaaaatgaaggtcctgtatgatttttagaaactccaccaaattctgaagattaaactc

SEQ ID NO: 1894 - DNA, 200 bp, Amaranthus palmeri
gagtttaatcttcagaatttggtggagtttctaaaaatcatacaggaccttcattttcctgaagctgcagtatccttgggatggcaagaagagaagtgtttctgcgcatatttatcccaaagctcctaatcatttccaatgtctcactagatagtgcaaagctgctgcagcacttgctgagacaatccacatgcagtact

SEQ ID NO: 1895 - DNA, 200 bp, Amaranthus palmeri
ccaccaaattctgaagattaaactcacctccgtacctaacattgagatatcttcagtatattctcacctacctgataccttgctatgagatctctgtaaatcagcttcactaagacaagccaaaatttctaactagaagtcattttctgcaaattttaatgcagattccagaactacccattatcattaaacttgaatat

SEQ ID NO: 1896 - DNA, 200 bp, Amaranthus palmeri
atattcaagtttaatgataatgggtagttctggaatctgcattaaaatttgcagaaaatgacttctagttagaaattttggcttgtcttagtgaagctgatttacagagatctcatagcaaggtatcaggtaggtgagaatatactgaagatatctcaatgttaggtacggaggtgagtttaatcttcagaatttggtgg

SEQ ID NO: 1897 - DNA, 200 bp, Amaranthus palmeri
aaatttccatccatggaggctgtgtcgactcacctttcaacgagttttaactccatttcgaaaagcaatagattcaaccgccaaactgcaaaacgattagggttcaccttgaaaccccattctctgtgttttaagtttaactccaatgatgacaggaattcggagtttgataaactggttgtatctgcaagcaatgttga

SEQ ID NO: 1898 - DNA, 200 bp, Amaranthus palmeri
tcaacattgcttgcagatacaaccagtttatcaaactccgaattcctgtcatcattggagttaaacttaaaacacagagaatggggtttcaaggtgaaccctaatcgttttgcagtttggcggttgaatctattgcttttcgaaatggagttaaaactcgttgaaaggtgagtcgacacagcctccatggatggaaattt

SEQ ID NO: 1899 - DNA, 200 bp, Amaranthus palmeri
tggttgtatctgcaagcaatgttgatcaactgggaaatcaaagtaacttatcctttaatcccccttcttcctctcgatcaaaggagagacgacatacaatatcagtatttgtgggggatgaaagtggaatgattaatcgaatagcaggggtttttgccagaagaggttataatatcgaatcactcgctgttggattgaac

SEQ ID NO: 1900 - DNA, 200 bp, Amaranthus palmeri
gttcaatccaacagcgagtgattcgatattataacctcttctggcaaaaacccctgctattcgattaatcattccactttcatcccccacaaatactgatattgtatgtcgtctctcctttgatcgagaggaagaagggggattaaaggataagttactttgatttcccagttgatcaacattgcttgcagatacaacca

SEQ ID NO: 1901 - DNA, 200 bp, Amaranthus palmeri
cgaatcactcgctgttggattgaacaaggacaaagctctcttcactattgtagtttccggaacggataatgtgttgcagcaagtgatggaacagcttcaaaagcttgtcaatgttttgaaggttgaagatatatccaaggagcctcaagtagaacgtgaattgatgcttgtaaaagttggagctgatcggaataaccgtg

SEQ ID NO: 1902 - DNA, 200 bp, Amaranthus palmeri
cacggttattccgatcagctccaacttttacaagcatcaattcacgttctacttgaggctccttggatatatcttcaaccttcaaaacattgacaagcttttgaagctgttccatcacttgctgcaacacattatccgttccggaaactacaatagtgaagagagctttgtccttgttcaatccaacagcgagtgattcg

SEQ ID NO: 1903 - DNA, 200 bp, Amaranthus palmeri
gttggagctgatcggaataaccgtgctgagctgatgtggttggtggacatctttcgtgccaaaattgtggacatatcggaagagtatctttcaatagaggtcactggagatccaggaaagatggttgctgtccttagaaacctaagcaagtttggcatcaaagaaattgctcgtaccggaaagattgctctaagaaggga

SEQ ID NO: 1904 - DNA, 200 bp, Amaranthus palmeri
tcccttcttagagcaatctttccggtacgagcaatttctttgatgccaaacttgcttaggtttctaaggacagcaaccatctttcctggatctccagtgacctctattgaaagatactcttccgatatgtccacaattttggcacgaaagatgtccaccaaccacatcagctcagcacggttattccgatcagctccaac

SEQ ID NO: 1905 - DNA, 200 bp, Amaranthus palmeri
ccggaaagattgctctaagaagggaaaaattgggcgagtctgctcctttctggcgtttttctgctgcttcttatcctgatcttgaagaagctatccctatggatgctctttctggagtttcaaaagcagcaactgctgctggatcatcggattcgtctgtggagggtgatgtttatcctgtggagccgtttgatggtttc

SEQ ID NO: 1906 - DNA, 200 bp, Amaranthus palmeri
gaaaccatcaaacggctccacaggataaacatcaccctccacagacgaatccgatgatccagcagcagttgctgcttttgaaactccagaaagagcatccatagggatagcttcttcaagatcaggataagaagcagcagaaaaacgccagaaaggagcagactcgcccaatttttcccttcttagagcaatctttccgg

SEQ ID NO: 1907 - DNA, 200 bp, Amaranthus palmeri
tcctgtggagccgtttgatggtttctcccctccaatcttagatgctcattggggtattttgaatgaagaagatactagtgggatgcggtcacacactctatctattcttgtcaatgacaaacccggggtccttaatgttgttacgggggtttttgctcgaaggggttataacattcagagtttagctgtgggtcatgcgg

SEQ ID NO: 1908 - DNA, 200 bp, Amaranthus palmeri
ccgcatgacccacagctaaactctgaatgttataaccccttcgagcaaaaacccccgtaacaacattaaggaccccgggtttgtcattgacaagaatagatagagtgtgtgaccgcatcccactagtatcttcttcattcaaaataccccaatgagcatctaagattggaggggagaaaccatcaaacggctccacagga

SEQ ID NO: 1909 - DNA, 200 bp, Amaranthus palmeri
cagagtttagctgtgggtcatgcggaaggtgagggtctatctcgtatcactactgttgtacccggtacagatgaatcaattagcaaattggttcaacaaatctacaagctggttgatattcatgaggttagagatcttacccattatccatttgctgagcgagagttgatgttgataaaagtagctgtgaatactgctgc

SEQ ID NO: 1910 - DNA, 200 bp, Amaranthus palmeri
gcagcagtattcacagctacttttatcaacatcaactctcgctcagcaaatggataatgggtaagatctctaacctcatgaatatcaaccagcttgtagatttgttgaaccaatttgctaattgattcatctgtaccgggtacaacagtagtgatacgagatagaccctcaccttccgcatgacccacagctaaactctg

SEQ ID NO: 1911 - DNA, 200 bp, Amaranthus palmeri
taaaagtagctgtgaatactgctgcacgtcgtgaggtcctagacgttgccagcatttttagagcaaaagctgttgatgtatctgatcacaccataacacttgagctcactggagatttgaacaagatggttgctctacagagattgctcgaaccgtatggaatctgtgaggttgcacgaacaggacgtgtggccttgagt

SEQ ID NO: 1912 - DNA, 200 bp, Amaranthus palmeri
actcaaggccacacgtcctgttcgtgcaacctcacagattccatacggttcgagcaatctctgtagagcaaccatcttgttcaaatctccagtgagctcaagtgttatggtgtgatcagatacatcaacagcttttgctctaaaaatgctggcaacgtctaggacctcacgacgtgcagcagtattcacagctactttta

SEQ ID NO: 1913 - DNA, 200 bp, Amaranthus palmeri
acgaacaggacgtgtggccttgagtcgagaatcaggtgtagactcgagataccttcgtggatactctttccctgtataagagttctgtcaaaacgtatgatgtaaaaagcctttgggattttttcttttcgaaattgtctccaatttttgatcctttgaagttgtgttcttgaagaatatttgcaagtttgttatgaaac

SEQ ID NO: 1914 - DNA, 200 bp, Amaranthus palmeri
gtttcataacaaacttgcaaatattcttcaagaacacaacttcaaaggatcaaaaattggagacaatttcgaaaagaaaaaatcccaaaggctttttacatcatacgttttgacagaactcttatacagggaaagagtatccacgaaggtatctcgagtctacacctgattctcgactcaaggccacacgtcctgttcgt

SEQ ID NO: 1915 - DNA, 200 bp, Amaranthus palmeri
aagaaaagtgtagacacaattaaaaagttcactttgaataggaaccaaggaaatctaggtaaattataattatttaggagaatggtaaatcatcacaatgtggcctaattttataaaaggatatttggtattttttttaatatttttcttgtattaattattttattaaaatgactgatgatttctaaatcaccattatt

SEQ ID NO: 1916 - DNA, 200 bp, Amaranthus palmeri
aataatggtgatttagaaatcatcagtcattttaataaaataattaatacaagaaaaatattaaaaaaaataccaaatatccttttataaaattaggccacattgtgatgatttaccattctcctaaataattataatttacctagatttccttggttcctattcaaagtgaactttttaattgtgtctacacttttctt

SEQ ID NO: 1917 - DNA, 200 bp, Amaranthus palmeri
tgatgatttctaaatcaccattattgattaagatttatataaatcacattgtaaaagcaaaacaaaaagcacaaattcaataatatactctttaagtttgtttatcttctaattagttcggttaaaacggttccccactttcttctccgactctcacaattatcttcccctattcatttttcttccaccctctctaatgg

SEQ ID NO: 1918 - DNA, 200 bp, Amaranthus palmeri
ccattagagagggtggaagaaaaatgaataggggaagataattgtgagagtcggagaagaaagtggggaaccgttttaaccgaactaattagaagataaacaaacttaaagagtatattattgaatttgtgctttttgttttgcttttacaatgtgatttatataaatcttaatcaataatggtgatttagaaatcatca

SEQ ID NO: 1919 - DNA, 200 bp, Amaranthus palmeri
atttttcttccaccctctctaatggcggctgtttccttcaatatcaatggtggaaagattggaactttatgttcaagacacgaattcgtttgtgggtttgtaagaaaatttcattttagaactcatacttctatatttgaaaaacatatgccaaaaacttcaaggtttaaagcaatggaagtttctgcaaatgcaacagt

SEQ ID NO: 1920 - DNA, 200 bp, Amaranthus palmeri
actgttgcatttgcagaaacttccattgctttaaaccttgaagtttttggcatatgtttttcaaatatagaagtatgagttctaaaatgaaattttcttacaaacccacaaacgaattcgtgtcttgaacataaagttccaatctttccaccattgatattgaaggaaacagccgccattagagagggtggaagaaaaat

SEQ ID NO: 1921 - DNA, 200 bp, Amaranthus palmeri
tggaagtttctgcaaatgcaacagtaaatatagttcctgtttcagctcattctaggtaattttatttctcgaaaatttccgatttacaattaaattaatcttgttttgtaggtaatgaattgcagaagaaatagatggattcttatttgtttattggtatttgtttataaatttttgtttatattagtttctgaattgtg

SEQ ID NO: 1922 - DNA, 200 bp, Amaranthus palmeri
cacaattcagaaactaatataaacaaaaatttataaacaaataccaataaacaaataagaatccatctatttcttctgcaattcattacctacaaaacaagattaatttaattgtaaatcggaaattttcgagaaataaaattacctagaatgagctgaaacaggaactatatttactgttgcatttgcagaaacttcca

SEQ ID NO: 1923 - DNA, 200 bp, Amaranthus palmeri
tgtttatattagtttctgaattgtgattattctgattgtatgtcaaggtttaggttgttactaaatgtaaattggattgattgaagttgcaataaggtgatggcgtgatgctgattgttgtaaatttttgtttatattagtatagtactacttattgacctaagttcttttacatagtaggagatattataacttttgct

SEQ ID NO: 1924 - DNA, 200 bp, Amaranthus palmeri
agcaaaagttataatatctcctactatgtaaaagaacttaggtcaataagtagtactatactaatataaacaaaaatttacaacaatcagcatcacgccatcaccttattgcaacttcaatcaatccaatttacatttagtaacaacctaaaccttgacatacaatcagaataatcacaattcagaaactaatataaaca

SEQ ID NO: 1925 - DNA, 200 bp, Amaranthus palmeri
agtaggagatattataacttttgcttgtggactcagggccggccctaagggtgggcaagaggggccgtctcccaatgcccatgtcaaaaaagcaaaattaatggttatataaggtttatataggttataaattgtaaaggaaaaggacgtcaatgtgtcatttctcccagggccccaaaatatctaggaccggtcctgaa

SEQ ID NO: 1926 - DNA, 200 bp, Amaranthus palmeri
ttcaggaccggtcctagatattttggggccctgggagaaatgacacattgacgtccttttcctttacaatttataacctatataaaccttatataaccattaattttgcttttttgacatgggcattgggagacggcccctcttgcccacccttagggccggccctgagtccacaagcaaaagttataatatctcctact

SEQ ID NO: 1927 - DNA, 200 bp, Amaranthus palmeri
caaaatatctaggaccggtcctgaaagaaactactcaaaatttgtaggattttctattgagacatttttttttttgtggattaatgattgaactaagatcaaatagatactatttctgtttgattgaaacttttgggtagccggatgtgtaccggcgtgtgacttctttttgagttggttgattcaattgtattgttaga

SEQ ID NO: 1928 - DNA, 200 bp, Amaranthus palmeri
tctaacaatacaattgaatcaaccaactcaaaaagaagtcacacgccggtacacatccggctacccaaaagtttcaatcaaacagaaatagtatctatttgatcttagttcaatcattaatccacaaaaaaaaaaatgtctcaatagaaaatcctacaaattttgagtagtttctttcaggaccggtcctagatattttg

SEQ ID NO: 1929 - DNA, 200 bp, Amaranthus palmeri
tggttgattcaattgtattgttagaaatgatcttttctagggtctttggagacattggttctttacttttagtctatgaattatgatagtgttggtttaaacaccattttgttaccctattgtgattaagtgactcccagctcgattaaatttaggagttatattaatgttgtctttgttagttatattgatggtcggta

SEQ ID NO: 1930 - DNA, 200 bp, Amaranthus palmeri
taccgaccatcaatataactaacaaagacaacattaatataactcctaaatttaatcgagctgggagtcacttaatcacaatagggtaacaaaatggtgtttaaaccaacactatcataattcatagactaaaagtaaagaaccaatgtctccaaagaccctagaaaagatcatttctaacaatacaattgaatcaacca

SEQ ID NO: 1931 - DNA, 200 bp, Amaranthus palmeri
ttgttagttatattgatggtcggtagttcggttaagtttgtctatgaatacattgattttatccttatttggccaacaaatgtatgtaatttaggaaagttatatgatttaccactttgtatttgtatctctgttattttctttcttcttttcttgatgtgttggttggataaaaggaatttggagggaaagaaaggaaa

SEQ ID NO: 1932 - DNA, 200 bp, Amaranthus palmeri
tttcctttctttccctccaaattccttttatccaaccaacacatcaagaaaagaagaaagaaaataacagagatacaaatacaaagtggtaaatcatataactttcctaaattacatacatttgttggccaaataaggataaaatcaatgtattcatagacaaacttaaccgaactaccgaccatcaatataactaacaa

SEQ ID NO: 1933 - DNA, 200 bp, Amaranthus palmeri
ggaatttggagggaaagaaaggaaagagaaatagagggatgagactttgtcatatgtatatcaaatagagatgggaaatggaggggagggaataataacaatgaattccttctgttgtttttgaaaccaatttctccattattagaaggaactcatatccttgtgtatgatcggagaaagtaatgactgaatcattcatg

SEQ ID NO: 1934 - DNA, 200 bp, Amaranthus palmeri
catgaatgattcagtcattactttctccgatcatacacaaggatatgagttccttctaataatggagaaattggtttcaaaaacaacagaaggaattcattgttattattccctcccctccatttcccatctctatttgatatacatatgacaaagtctcatccctctatttctctttcctttctttccctccaaattcc

SEQ ID NO: 1935 - DNA, 200 bp, Amaranthus palmeri
gaaagtaatgactgaatcattcatgaagctcatccttggtgaatttatctcttgctaatttctcccattttagaatgaccccggtcactacatttatgctaagtctgattgctcgggccgttgcctactaatcattccaaatctcttgaataaaagtcattttaaattatcaaatgtatctcattctatgctgttttttt

SEQ ID NO: 1936 - DNA, 200 bp, Amaranthus palmeri
aaaaaaacagcatagaatgagatacatttgataatttaaaatgacttttattcaagagatttggaatgattagtaggcaacggcccgagcaatcagacttagcataaatgtagtgaccggggtcattctaaaatgggagaaattagcaagagataaattcaccaaggatgagcttcatgaatgattcagtcattactttc

SEQ ID NO: 1937 - DNA, 200 bp, Amaranthus palmeri
gtatctcattctatgctgttttttttcttgtatgttgttatcattagcatggtaacaaaatgtattttcattcttttccagggtgatgcgccacacaatttcagtctttgttggggatgaaagtggtataatcaataggattgccggcgttatttctaggagaggatacaacatagagtctctagctgttggtttaaata

SEQ ID NO: 1938 - DNA, 200 bp, Amaranthus palmeri
tatttaaaccaacagctagagactctatgttgtatcctctcctagaaataacgccggcaatcctattgattataccactttcatccccaacaaagactgaaattgtgtggcgcatcaccctggaaaagaatgaaaatacattttgttaccatgctaatgataacaacatacaagaaaaaaaacagcatagaatgagatac

SEQ ID NO: 1939 - DNA, 200 bp, Amaranthus palmeri
gagtctctagctgttggtttaaataaggataaggctctttttactatagtagtgtgtgggactgacaaggtgttgcgccaagtaatggagcagctcagcaagcttgttaatgtcttaaaggtagtcatctccttttttcttactttaaggtaactagtgatactttcatttagtagtggcggtcaatggtgatgctaacc

SEQ ID NO: 1940 - DNA, 200 bp, Amaranthus palmeri
ggttagcatcaccattgaccgccactactaaatgaaagtatcactagttaccttaaagtaagaaaaaaggagatgactacctttaagacattaacaagcttgctgagctgctccattacttggcgcaacaccttgtcagtcccacacactactatagtaaaaagagccttatccttatttaaaccaacagctagagactc

SEQ ID NO: 1941 - DNA, 200 bp, Amaranthus palmeri
gtggcggtcaatggtgatgctaaccatgcatgttcatattgtttgtgcaatattgctcattttggctttatcattgttgttaaactttgagagaatgtaatctcaagagcatctatcctcacttcaagatagatagagcagggaaacactcatgattcttttaataaactttcaaaatattaaaattcccttgccctaat

SEQ ID NO: 1942 - DNA, 200 bp, Amaranthus palmeri
attagggcaagggaattttaatattttgaaagtttattaaaagaatcatgagtgtttccctgctctatctatcttgaagtgaggatagatgctcttgagattacattctctcaaagtttaacaacaatgataaagccaaaatgagcaatattgcacaaacaatatgaacatgcatggttagcatcaccattgaccgccac

SEQ ID NO: 1943 - DNA, 200 bp, Amaranthus palmeri
aatattaaaattcccttgccctaatgcaattttatagctcccagctaatccgagttcaaggggttcgagtgtatgcaaccatactcatataacaacaaaatggttgattcagattgacccttaaaatcaaataccatcttgcaaattcacttaaacacatactttaacgacccgttttatagtagtccattaaaattcga

SEQ ID NO: 1944 - DNA, 200 bp, Amaranthus palmeri
tcgaattttaatggactactataaaacgggtcgttaaagtatgtgtttaagtgaatttgcaagatggtatttgattttaagggtcaatctgaatcaaccattttgttgttatatgagtatggttgcatacactcgaaccccttgaactcggattagctgggagctataaaattgcattagggcaagggaattttaatatt

SEQ ID NO: 1945 - DNA, 200 bp, Amaranthus palmeri
tttatagtagtccattaaaattcgaaagcaaagaattataaaatcttttattccatcgagaatagacacaataatcttcaaagcaatgtctataaaaagtttgtcgtgtcaccgtatcgtaacttaattgtaagggccttcaattttactgccatcaaaatataggttgagacccacaaaaccatttacatagacaagag

SEQ ID NO: 1946 - DNA, 200 bp, Amaranthus palmeri
ctcttgtctatgtaaatggttttgtgggtctcaacctatattttgatggcagtaaaattgaaggcccttacaattaagttacgatacggtgacacgacaaactttttatagacattgctttgaagattattgtgtctattctcgatggaataaaagattttataattctttgctttcgaattttaatggactactataaa

SEQ ID NO: 1947 - DNA, 200 bp, Amaranthus palmeri
acaaaaccatttacatagacaagagccatttcactaccattatcatgaccatgattgagaccgcatttgtgcacaatggtcaagtgacattgttcagcactactcagaacttgaattggaggaatttgtctaatgatctacttatgtaacaaattcttgataatgttgtcacatatagtggggagaagtttgaaggtcac

SEQ ID NO: 1948 - DNA, 200 bp, Amaranthus palmeri
gtgaccttcaaacttctccccactatatgtgacaacattatcaagaatttgttacataagtagatcattagacaaattcctccaattcaagttctgagtagtgctgaacaatgtcacttgaccattgtgcacaaatgcggtctcaatcatggtcatgataatggtagtgaaatggctcttgtctatgtaaatggttttgt

SEQ ID NO: 1949 - DNA, 200 bp, Amaranthus palmeri
tagtggggagaagtttgaaggtcacatagctaccacatgtaactgaatgcatctattgcagttaaacctaatggcagggagctgtcaatgcagtcttttgaaaggaacttgtagaaggtatcttttaaagaaaaaaaatttgtcgttagtttttaaaaaaagttaaaaattattttcttgaaaattttctttttaagtaa

SEQ ID NO: 1950 - DNA, 200 bp, Amaranthus palmeri
ttacttaaaaagaaaattttcaagaaaataatttttaactttttttaaaaactaacgacaaattttttttctttaaaagataccttctacaagttcctttcaaaagactgcattgacagctccctgccattaggtttaactgcaatagatgcattcagttacatgtggtagctatgtgaccttcaaacttctccccacta

SEQ ID NO: 1951 - DNA, 200 bp, Amaranthus palmeri
tcttgaaaattttctttttaagtaaaataagtgtggtaaaatggacattatgttggaacttagaatttttagtaatagcttgttaattagcatgggaagtgattaatgaagttttatgtccattaggtaataatgtgtgaagtattcttatatgtattattgcttgcactttccatttgatggtgcgcatcagggtgtgc

SEQ ID NO: 1952 - DNA, 200 bp, Amaranthus palmeri
gcacaccctgatgcgcaccatcaaatggaaagtgcaagcaataatacatataagaatacttcacacattattacctaatggacataaaacttcattaatcacttcccatgctaattaacaagctattactaaaaattctaagttccaacataatgtccattttaccacacttattttacttaaaaagaaaattttcaaga

SEQ ID NO: 1953 - DNA, 200 bp, Amaranthus palmeri
tttgatggtgcgcatcagggtgtgcaatagtactttatctgatctgacatatatgttcttacttatgctatatgctcgcatttaagcattccttactaaaggtgtttaacgggacgattcgactaatggatcaacggtcgggtcgggtcatatctttaacgggtcatcagcgggtcaggttaataaagggtcgaaccatt

SEQ ID NO: 1954 - DNA, 200 bp, Amaranthus palmeri
aatggttcgaccctttattaacctgacccgctgatgacccgttaaagatatgacccgacccgaccgttgatccattagtcgaatcgtcccgttaaacacctttagtaaggaatgcttaaatgcgagcatatagcataagtaagaacatatatgtcagatcagataaagtactattgcacaccctgatgcgcaccatcaaa

SEQ ID NO: 1955 - DNA, 200 bp, Amaranthus palmeri
caggttaataaagggtcgaaccattaacgggccttgatgtaaagggtcgggcagagccgggtcaaataattataggaattggttgcaaaaaattttttttccactgtttgtttttatattttagatgatattatatacatagttaggtcgatccaacgggccataaagtagaataaaaaaaactattacatgaaccttta

SEQ ID NO: 1956 - DNA, 200 bp, Amaranthus palmeri
taaaggttcatgtaatagttttttttattctactttatggcccgttggatcgacctaactatgtatataatatcatctaaaatataaaaacaaacagtggaaaaaaaattttttgcaaccaattcctataattatttgacccggctctgcccgaccctttacatcaaggcccgttaatggttcgaccctttattaacctg

SEQ ID NO: 1957 - DNA, 200 bp, Amaranthus palmeri
aaaaaaactattacatgaacctttaaaaacgggtcgaagtgggcctggtttaaacgggctttgacccgtcctgccccgttgaaatttgacatgaccctccccgcctcgccctatttaaatttagctccatcccggcccattgaacacatctattcctaaaataactaacattatgatggctcatcctattcgctaccatg

SEQ ID NO: 1958 - DNA, 200 bp, Amaranthus palmeri
catggtagcgaataggatgagccatcataatgttagttattttaggaatagatgtgttcaatgggccgggatggagctaaatttaaatagggcgaggcggggagggtcatgtcaaatttcaacggggcaggacgggtcaaagcccgtttaaaccaggcccacttcgacccgtttttaaaggttcatgtaatagttttttt

SEQ ID NO: 1959 - DNA, 200 bp, Amaranthus palmeri
atggctcatcctattcgctaccatgcatgtaaatgtacacagtgtctatccgtttatccttttttatatccctgtataccatttgtgactaacggtattaattttttatcttccttgtaggttgaagatctatctagagagcctcaagtggaacgtgaacttatgctattaaagcttcattctaatgcggatacccatgc

SEQ ID NO: 1960 - DNA, 200 bp, Amaranthus palmeri
gcatgggtatccgcattagaatgaagctttaatagcataagttcacgttccacttgaggctctctagatagatcttcaacctacaaggaagataaaaaattaataccgttagtcacaaatggtatacagggatataaaaaaggataaacggatagacactgtgtacatttacatgcatggtagcgaataggatgagccat

SEQ ID NO: 1961 - DNA, 200 bp, Amaranthus palmeri
ttcattctaatgcggatacccatgctgaggtagttccacaagttcaaataattatatcctgaatgctatataattcatgaatcttttgttttcctcttagaatcatcagctacaagaaggtagataaagataagcaaatattcaaaaatatgctataacatcatgtgctttgtaagctttaaacttagagataacaaaaa

SEQ ID NO: 1962 - DNA, 200 bp, Amaranthus palmeri
tttttgttatctctaagtttaaagcttacaaagcacatgatgttatagcatatttttgaatatttgcttatctttatctaccttcttgtagctgatgattctaagaggaaaacaaaagattcatgaattatatagcattcaggatataattatttgaacttgtggaactacctcagcatgggtatccgcattagaatgaa

SEQ ID NO: 1963 - DNA, 200 bp, Amaranthus palmeri
gctttaaacttagagataacaaaaatacttaaggatacatcatgggtatgtagctgaagatcatatgagaagttacattgcttctttgtgtgtatcgtaaacaatctggtattgtataagtccaaattccatattttgattttcagataatgtggttagtggacatcttcagggcaaaaattgtcgatatgtcggaaagc

SEQ ID NO: 1964 - DNA, 200 bp, Amaranthus palmeri
gctttccgacatatcgacaatttttgccctgaagatgtccactaaccacattatctgaaaatcaaaatatggaatttggacttatacaataccagattgtttacgatacacacaaagaagcaatgtaacttctcatatgatcttcagctacatacccatgatgtatccttaagtatttttgttatctctaagtttaaagc

SEQ ID NO: 1965 - DNA, 200 bp, Amaranthus palmeri
aatctggtatatttttcattgatttgtgtgtgttgttgcttcttgcatgttatttgttcttccgtttgatttttatacaagagagcgtgcaaattttagcatgttgtcagttcttaaattgatcactgtctgtattttgttagtctaccccattaaaacgactcactaaatcactttttttatttgggtgaagatgttta

SEQ ID NO: 1966 - DNA, 200 bp, Amaranthus palmeri
taaacatcttcacccaaataaaaaaagtgatttagtgagtcgttttaatggggtagactaacaaaatacagacagtgatcaatttaagaactgacaacatgctaaaatttgcacgctctcttgtataaaaatcaaacggaagaacaaataacatgcaagaagcaacaacacacacaaatcaatgaaaaatataccagatt

SEQ ID NO: 1967 - DNA, 200 bp, Amaranthus palmeri
ttttttatttgggtgaagatgtttatgatctttgctacaaagatttaatcggaaataatttctagttattatcactaataagggtaagatcgtatacattagactccaaaccccggccgtaatagaattggggtaatgattaaggtaatgaaatgttgttgcctgtatttttgtaatgaattccaaacaggctgttaaat

SEQ ID NO: 1968 - DNA, 200 bp, Amaranthus palmeri
atttaacagcctgtttggaattcattacaaaaatacaggcaacaacatttcattaccttaatcattaccccaattctattacggccggggtttggagtctaatgtatacgatcttacccttattagtgataataactagaaattatttccgattaaatctttgtagcaaagatcataaacatcttcacccaaataaaaaa

SEQ ID NO: 1969 - DNA, 200 bp, Amaranthus palmeri
atgaattccaaacaggctgttaaatatagatactttccctgtaaaaatacaagagtttataaggctcttattcaacccaacataagtttattgaaagatttattagtagtctttttgtgattcgtaaccttgtaattaccaagtacagctctttatttctatgacattgaaaccgtctgcaatcaaattgacctagtgct

SEQ ID NO: 1970 - DNA, 200 bp, Amaranthus palmeri
agcactaggtcaatttgattgcagacggtttcaatgtcatagaaataaagagctgtacttggtaattacaaggttacgaatcacaaaaagactactaataaatctttcaataaacttatgttgggttgaataagagccttataaactcttgtatttttacagggaaagtatctatatttaacagcctgtttggaattcat

SEQ ID NO: 1971 - DNA, 200 bp, Amaranthus palmeri
tctgcaatcaaattgacctagtgctaaaagctgcttgatttgcttattgccttaagtgaaaatttatagcaagcgttttggaggaagaaaagcaaaaagatcgatatgctttcatgtcttcagaaaattagttccgaaagttgtggagtataatagagttcaactattgtgcatgtaaaatattaatctcaagtaattct

SEQ ID NO: 1972 - DNA, 200 bp, Amaranthus palmeri
agaattacttgagattaatattttacatgcacaatagttgaactctattatactccacaactttcggaactaattttctgaagacatgaaagcatatcgatctttttgcttttcttcctccaaaacgcttgctataaattttcacttaaggcaataagcaaatcaagcagcttttagcactaggtcaatttgattgcaga

SEQ ID NO: 1973 - DNA, 200 bp, Amaranthus palmeri
taaaatattaatctcaagtaattctgatagaagaccatctgggaagatttaattagtgctaatctgggaggaattattaagattagtcagtaatctggcaacatttatctaggaggatagaaaaggcattgaccgtatgtagtaatattagtgcatgggaagttcacgtgcagttggaagacacttttccgttataaagg

SEQ ID NO: 1974 - DNA, 200 bp, Amaranthus palmeri
cctttataacggaaaagtgtcttccaactgcacgtgaacttcccatgcactaatattactacatacggtcaatgccttttctatcctcctagataaatgttgccagattactgactaatcttaataattcctcccagattagcactaattaaatcttcccagatggtcttctatcagaattacttgagattaatatttta

SEQ ID NO: 1975 - DNA, 200 bp, Amaranthus palmeri
ggaagacacttttccgttataaagggtcattatgaaatagtggacacgtgttagtaggagaagctaagagcgccatagaaaataaaggaaaaaccattaaagtaattaagggcttgaaacaaccaaaacaagcacagtggcctgtggagaattttggggattaatttctttctcttccaacattataatgtcaatttatg

SEQ ID NO: 1976 - DNA, 200 bp, Amaranthus palmeri
cataaattgacattataatgttggaagagaaagaaattaatccccaaaattctccacaggccactgtgcttgttttggttgtttcaagcccttaattactttaatggtttttcctttattttctatggcgctcttagcttctcctactaacacgtgtccactatttcataatgaccctttataacggaaaagtgtcttcc

SEQ ID NO: 1977 - DNA, 200 bp, Amaranthus palmeri
tccaacattataatgtcaatttatgtcatttgtgctaaagtgacacttaatgtaccctatcttccttcgacttaatttaaactatcgtgacttcaactcttatctttattgttataacctagcttctacccattacgcgagttcattttcatctacctttatatagcttatcattaatatgttctcataataattcaaaa

SEQ ID NO: 1978 - DNA, 200 bp, Amaranthus palmeri
ttttgaattattatgagaacatattaatgataagctatataaaggtagatgaaaatgaactcgcgtaatgggtagaagctaggttataacaataaagataagagttgaagtcacgatagtttaaattaagtcgaaggaagatagggtacattaagtgtcactttagcacaaatgacataaattgacattataatgttgga

SEQ ID NO: 1979 - DNA, 200 bp, Amaranthus palmeri
aatatgttctcataataattcaaaagtttgcatctatctaattttagagctacaagtgttgcttgtagtaattgtgtgtcgttagattgtagtgcgtgaactatccatttttcgtgaactgttgcatttcttgaatgacttgtctctagaatgatgctccttaaacttacttcttttgtatcatgtatgtttaagggaga

SEQ ID NO: 1980 - DNA, 200 bp, Amaranthus palmeri
tctcccttaaacatacatgatacaaaagaagtaagtttaaggagcatcattctagagacaagtcattcaagaaatgcaacagttcacgaaaaatggatagttcacgcactacaatctaacgacacacaattactacaagcaacacttgtagctctaaaattagatagatgcaaacttttgaattattatgagaacatatt

SEQ ID NO: 1981 - DNA, 200 bp, Amaranthus palmeri
ttgtatcatgtatgtttaagggagagacgacatacaatatcagtatttgtgggggatgaaagtggaatgattaatcgaatagcaggggtttttgccagaagaggttataatatcgaatcactcgctgttggattgaacaaggacaaagctctcttcactattgtagtttctggaacggataatgtgttgcagcaagtgat

SEQ ID NO: 1982 - DNA, 200 bp, Amaranthus palmeri
atcacttgctgcaacacattatccgttccagaaactacaatagtgaagagagctttgtccttgttcaatccaacagcgagtgattcgatattataacctcttctggcaaaaacccctgctattcgattaatcattccactttcatcccccacaaatactgatattgtatgtcgtctctcccttaaacatacatgatacaa

SEQ ID NO: 1983 - DNA, 200 bp, Amaranthus palmeri
cggataatgtgttgcagcaagtgatggaacagcttcaaaagcttgtcaatgttttgaaggttattttccttttgaataattaccgtggcatccatgtcttcaattgtttagaattctcatcactaagcacaacttgtacatttaggttgaagatatatccaaggagcctcaagtagaacgtgaattgatgcttgtaaaag

SEQ ID NO: 1984 - DNA, 200 bp, Amaranthus palmeri
cttttacaagcatcaattcacgttctacttgaggctccttggatatatcttcaacctaaatgtacaagttgtgcttagtgatgagaattctaaacaattgaagacatggatgccacggtaattattcaaaaggaaaataaccttcaaaacattgacaagcttttgaagctgttccatcacttgctgcaacacattatccg

SEQ ID NO: 1985 - DNA, 200 bp, Amaranthus palmeri
gaacgtgaattgatgcttgtaaaagttggagctgatcggaataaccgtgctgaggtacctaataatatatgtcaaaatacccaactgtacaaaagagttgatcttattagatacaggcagatatgttagctacagcctacatctctatgttttttgtggcaactttctgctacatgccgatctttcttagttttctccta

SEQ ID NO: 1986 - DNA, 200 bp, Amaranthus palmeri
taggagaaaactaagaaagatcggcatgtagcagaaagttgccacaaaaaacatagagatgtaggctgtagctaacatatctgcctgtatctaataagatcaactcttttgtacagttgggtattttgacatatattattaggtacctcagcacggttattccgatcagctccaacttttacaagcatcaattcacgttc

SEQ ID NO: 1987 - DNA, 200 bp, Amaranthus palmeri
gccgatctttcttagttttctcctagtgaattgtaatttttaatatataatttgttattccactatgtctgttcctgatttactttcgctgatcacatcgttcgtgtttcttctattgtagctgatgtggttggtggacatctttcgtgccaaaattgtggacatatcggaagagtatctttcaatagaggtaatcacag

SEQ ID NO: 1988 - DNA, 200 bp, Amaranthus palmeri
ctgtgattacctctattgaaagatactcttccgatatgtccacaattttggcacgaaagatgtccaccaaccacatcagctacaatagaagaaacacgaacgatgtgatcagcgaaagtaaatcaggaacagacatagtggaataacaaattatatattaaaaattacaattcactaggagaaaactaagaaagatcggc

SEQ ID NO: 1989 - DNA, 200 bp, Amaranthus palmeri
tatctttcaatagaggtaatcacaggatatttcataaaatcaatgttaattttgggaatattgggaatattgtgacaagtatcaatgttttatgtacaggttaagtgtttaatttgcattttccacaagctacttcatcctcttctccgaagatgtgtaaaattgtaatatacatattcacaccaattttaaaattttgg

SEQ ID NO: 1990 - DNA, 200 bp, Amaranthus palmeri
ccaaaattttaaaattggtgtgaatatgtatattacaattttacacatcttcggagaagaggatgaagtagcttgtggaaaatgcaaattaaacacttaacctgtacataaaacattgatacttgtcacaatattcccaatattcccaaaattaacattgattttatgaaatatcctgtgattacctctattgaaagata

SEQ ID NO: 1991 - DNA, 200 bp, Amaranthus palmeri
attcacaccaattttaaaattttggaagagcgacatacaaatgatttatgacctaattttgctgtatatatacatgcttatattttcttcaaacagctttagaaaattgattatatttttcctccttcaaagaaaacaagttttgtgagataaaagctacatgtttagtaagcaaatttaatgaagactgatgaaaacaa

SEQ ID NO: 1992 - DNA, 200 bp, Amaranthus palmeri
ttgttttcatcagtcttcattaaatttgcttactaaacatgtagcttttatctcacaaaacttgttttctttgaaggaggaaaaatataatcaattttctaaagctgtttgaagaaaatataagcatgtatatatacagcaaaattaggtcataaatcatttgtatgtcgctcttccaaaattttaaaattggtgtgaat

SEQ ID NO: 1993 - DNA, 200 bp, Amaranthus palmeri
atttaatgaagactgatgaaaacaaaatttgtacttttgaatggttttatatattttatgatctttgtaagctaatatggaaactataagattgtagttggttttctttagctcttttcgcttttacctttcatttttttttacatgcttaaaaaagcgactcacctagtactttgatatccaggtcactggagatccag

SEQ ID NO: 1994 - DNA, 200 bp, Amaranthus palmeri
ctggatctccagtgacctggatatcaaagtactaggtgagtcgcttttttaagcatgtaaaaaaaaatgaaaggtaaaagcgaaaagagctaaagaaaaccaactacaatcttatagtttccatattagcttacaaagatcataaaatatataaaaccattcaaaagtacaaattttgttttcatcagtcttcattaaat

SEQ ID NO: 1995 - DNA, 200 bp, Amaranthus palmeri
gatatccaggtcactggagatccaggaaagatggttgctgtccttagaaacctaagcaagtttggcatcaaagaaattgctcgtaccggaaaggtttactaattttttttgtaaatttttcattgttgtttaagagatcttttagtttccacattgcataataaatgtgaatgccttttgtttattgcttgtccagggtt

SEQ ID NO: 1996 - DNA, 200 bp, Amaranthus palmeri
aaccctggacaagcaataaacaaaaggcattcacatttattatgcaatgtggaaactaaaagatctcttaaacaacaatgaaaaatttacaaaaaaaattagtaaacctttccggtacgagcaatttctttgatgccaaacttgcttaggtttctaaggacagcaaccatctttcctggatctccagtgacctggatatc

SEQ ID NO: 1997 - DNA, 200 bp, Amaranthus palmeri
ttttgtttattgcttgtccagggtttttatatttttttaagatgtaaagtttaatatctaacagattgctctaagaagggaaaaattgggcgagtctgctcctttctggcgtttttctgctgcttcttatcctgatcttgaagaagctatccctatggattctctttctggagttgcaaaagcagcaactgctgctggat

SEQ ID NO: 1998 - DNA, 200 bp, Amaranthus palmeri
atccagcagcagttgctgcttttgcaactccagaaagagaatccatagggatagcttcttcaagatcaggataagaagcagcagaaaaacgccagaaaggagcagactcgcccaatttttcccttcttagagcaatctgttagatattaaactttacatcttaaaaaaatataaaaaccctggacaagcaataaacaaaa

SEQ ID NO: 1999 - DNA, 200 bp, Amaranthus palmeri
gcaaaagcagcaactgctgctggatcatcggattcgtctgtggaggtgtgtttcttatttgtccaaaattaagtgtccaagtgtcgtgcccaagtccgaatatcgaggatcagacatgggtacttgagttaaaatgaagagtccgggtaacaaatgtaattgatttaaaaacatatagttgccggattttaaaatttttt

SEQ ID NO: 2000 - DNA, 200 bp, Amaranthus palmeri
aaaaaattttaaaatccggcaactatatgtttttaaatcaattacatttgttacccggactcttcattttaactcaagtacccatgtctgatcctcgatattcggacttgggcacgacacttggacacttaattttggacaaataagaaacacacctccacagacgaatccgatgatccagcagcagttgctgcttttgc

SEQ ID NO: 2001 - DNA, 200 bp, Amaranthus palmeri
tagttgccggattttaaaatttttttaaaggtagttggaaaattttccttttattggaaaaacttttggaggacaatatttttgtgaatgtgtctcgagtgcctcttatgttaaagggcctcaagacgaataggaaatggcgggcgggtcgaatgcgggtgtgcaggctggttgctggcaatgtttccgcaggctgttgt

SEQ ID NO: 2002 - DNA, 200 bp, Amaranthus palmeri
acaacagcctgcggaaacattgccagcaaccagcctgcacacccgcattcgacccgcccgccatttcctattcgtcttgaggccctttaacataagaggcactcgagacacattcacaaaaatattgtcctccaaaagtttttccaataaaaggaaaattttccaactacctttaaaaaaattttaaaatccggcaacta

SEQ ID NO: 2003 - DNA, 200 bp, Amaranthus palmeri
tggcaatgtttccgcaggctgttgttggtgtgcttttcacttcagtagcaatttacagcaaattagtagcaaatttacagcaaatttacagcagaatgttagctcaataacccatcatgacataaatattaatgtataacataactttaactacaaaatacaatttagaatcatcaaatcacaatttagttgtttaatat

SEQ ID NO: 2004 - DNA, 200 bp, Amaranthus palmeri
atattaaacaactaaattgtgatttgatgattctaaattgtattttgtagttaaagttatgttatacattaatatttatgtcatgatgggttattgagctaacattctgctgtaaatttgctgtaaatttgctactaatttgctgtaaattgctactgaagtgaaaagcacaccaacaacagcctgcggaaacattgcca

SEQ ID NO: 2005 - DNA, 200 bp, Amaranthus palmeri
aaatcacaatttagttgtttaatatacattaaaatatttctttgtaggaacttcaattctatctcttagtagcataaattttacaatcaaacgcaacaaaagtattaagttagaaagggagtactgcatgtggattgtctcagctaaagtgctgcagcagctttgcacattatctagtgagacattggaaatgattagga

SEQ ID NO: 2006 - DNA, 200 bp, Amaranthus palmeri
tcctaatcatttccaatgtctcactagataatgtgcaaagctgctgcagcactttagctgagacaatccacatgcagtactccctttctaacttaatacttttgttgcgtttgattgtaaaatttatgctactaagagatagaattgaagttcctacaaagaaatattttaatgtatattaaacaactaaattgtgattt

SEQ ID NO: 2007 - DNA, 200 bp, Amaranthus palmeri
agtgagacattggaaatgattaggagctttgggataaatatgtacagaaacacttctcttcttgccatcccaaggatactgcagcttcaggaaaatgaaggtcctgtatgatttttagaaactccaccaaattctgaagattaagctcacctccgtacctaacattgagatatcttcagtatattcgcacctacctgata

SEQ ID NO: 2008 - DNA, 200 bp, Amaranthus palmeri
tatcaggtaggtgcgaatatactgaagatatctcaatgttaggtacggaggtgagcttaatcttcagaatttggtggagtttctaaaaatcatacaggaccttcattttcctgaagctgcagtatccttgggatggcaagaagagaagtgtttctgtacatatttatcccaaagctcctaatcatttccaatgtctcact

SEQ ID NO: 2009 - DNA, 200 bp, Amaranthus palmeri
tcagtatattcgcacctacctgataccttgctatgagatctctgttaatcagcttcactaagacaagccaaaatttctaactagaagtcattttctgcaaattttaatgcagattccagaactacccattatcattaaacttgaatatttcccctttttataacatttctgatgcctcttgtatgctaatcttttctaac

SEQ ID NO: 2010 - DNA, 200 bp, Amaranthus palmeri
gttagaaaagattagcatacaagaggcatcagaaatgttataaaaaggggaaatattcaagtttaatgataatgggtagttctggaatctgcattaaaatttgcagaaaatgacttctagttagaaattttggcttgtcttagtgaagctgattaacagagatctcatagcaaggtatcaggtaggtgcgaatatactga

SEQ ID NO: 2011 - DNA, 200 bp, Amaranthus palmeri
ctcttgtatgctaatcttttctaactatatacactaccacaaaacacaaatctatacttactctaaataagtttagtatgaattacattttatttttagtgactacgacttagaagtatatcttagacaacttacattgtagattaatatgacataatttgtttcttcaaaataaaaaatgacataatatgttatcaatc

SEQ ID NO: 2012 - DNA, 200 bp, Amaranthus palmeri
gattgataacatattatgtcattttttattttgaagaaacaaattatgtcatattaatctacaatgtaagttgtctaagatatacttctaagtcgtagtcactaaaaataaaatgtaattcatactaaacttatttagagtaagtatagatttgtgttttgtggtagtgtatatagttagaaaagattagcatacaagag

SEQ ID NO: 2013 - DNA, 200 bp, Amaranthus palmeri
aaaatgacataatatgttatcaatctagacctcctcaagacaagtatgataaaaaaaaactccaatgcaacaaaaattaattgatttttttgaaaaaagatagaagaaagtggaagaggcaacacaagtaaagaaggcttctcgatcctctgagcactctaaaccttgcaatacagtaaactataaataaaaacaacaaa

SEQ ID NO: 2014 - DNA, 200 bp, Amaranthus palmeri
tttgttgtttttatttatagtttactgtattgcaaggtttagagtgctcagaggatcgagaagccttctttacttgtgttgcctcttccactttcttctatcttttttcaaaaaaatcaattaatttttgttgcattggagtttttttttatcatacttgtcttgaggaggtctagattgataacatattatgtcatttt

SEQ ID NO: 2015 - DNA, 200 bp, Amaranthus palmeri
gtaaactataaataaaaacaacaaagttcagatatcatctcaatattttccccaaaaaaggttcaacatcatcttcttcctcttcttccacaatctcattgtcatgttcatctaaaagcctatccttgtcctcaatggtgttgtgcatagcacgccttggaggcacaccaacacttgcactgcctttgacttcaagaact

SEQ ID NO: 2016 - DNA, 200 bp, Amaranthus palmeri
agttcttgaagtcaaaggcagtgcaagtgttggtgtgcctccaaggcgtgctatgcacaacaccattgaggacaaggataggcttttagatgaacatgacaatgagattgtggaagaagaggaagaagatgatgttgaaccttttttggggaaaatattgagatgatatctgaactttgttgtttttatttatagtttac

SEQ ID NO: 2017 - DNA, 200 bp, Amaranthus palmeri
tgcactgcctttgacttcaagaactttgagtagcaacaatcgtcttatcaccttggccaaagggagatttggaagtcataatactcactggaatgtatataaaatgactataatattaaaagacaatgaaaatgatttttgtgcatttaaaaagatgttttcaagtgactatttttgggtttatcttttctatttcttct

SEQ ID NO: 2018 - DNA, 200 bp, Amaranthus palmeri
agaagaaatagaaaagataaacccaaaaatagtcacttgaaaacatctttttaaatgcacaaaaatcattttcattgtcttttaatattatagtcattttatatacattccagtgagtattatgacttccaaatctccctttggccaaggtgataagacgattgttgctactcaaagttcttgaagtcaaaggcagtgca

SEQ ID NO: 2019 - DNA, 200 bp, Amaranthus palmeri
tgggtttatcttttctatttcttctctctctttacttggacccttttcttcctattgcaacttggatctttcagattggacactctctttgtggctatatgatgttttctaagctctataagtatctttgctctacaactttcttgccttattcttctattaccatctcccacatactcccaatattattacttaaagaa

SEQ ID NO: 2020 - DNA, 200 bp, Amaranthus palmeri
ttctttaagtaataatattgggagtatgtgggagatggtaatagaagaataaggcaagaaagttgtagagcaaagatacttatagagcttagaaaacatcatatagccacaaagagagtgtccaatctgaaagatccaagttgcaataggaagaaaagggtccaagtaaagagagagaagaaatagaaaagataaaccca

SEQ ID NO: 2021 - DNA, 200 bp, Amaranthus palmeri
actcccaatattattacttaaagaattttggctgcttgtacaagtatgtttggtccttgaactacattctgtctccccccttccattgtattttctattacgggttttctgaaaatgtcctccctgcccttatttgtcatttatggctacatgacttgatcattgcactatatgatggaaatttaagcagtattgttgta

SEQ ID NO: 2022 - DNA, 200 bp, Amaranthus palmeri
tacaacaatactgcttaaatttccatcatatagtgcaatgatcaagtcatgtagccataaatgacaaataagggcagggaggacattttcagaaaacccgtaatagaaaatacaatggaaggggggagacagaatgtagttcaaggaccaaacatacttgtacaagcagccaaaattctttaagtaataatattgggagt

SEQ ID NO: 2023 - DNA, 200 bp, Amaranthus palmeri
tggaaatttaagcagtattgttgtagttgtacttttttgatgaatcatcatgtctgcttctgaattggactcacttcaatatcttgaaggtttttttcctctattttttagggtgatgtttatcctgtggagccgtttgatggtttctcccctccaatcttagatgctcattggggtattttgaatgaagaagatgtaag

SEQ ID NO: 2024 - DNA, 200 bp, Amaranthus palmeri
cttacatcttcttcattcaaaataccccaatgagcatctaagattggaggggagaaaccatcaaacggctccacaggataaacatcaccctaaaaaatagaggaaaaaaaccttcaagatattgaagtgagtccaattcagaagcagacatgatgattcatcaaaaaagtacaactacaacaatactgcttaaatttcca

SEQ ID NO: 2025 - DNA, 200 bp, Amaranthus palmeri
acatatgctaaaaacttcaaggtttaaagcaatggaagtttctgcaaatgcaacagtaaatatagttctgtttcagctcattctagggtgatgcgccacacaatttcagtctttgttggggatgaaagtgggataatcaataggattgcaggtgttatttctagaagaggatacaatatcgagtctttggctgtttgttt

SEQ ID NO: 2026 - DNA, 200 bp, Amaranthus palmeri
aaacaaacagccaaagactcgatattgtatcctcttctagaaataacacctgcaatcctattgattatcccactttcatccccaacaaagactgaaattgtgtggcgcatcaccctagaatgagctgaaacagaactatatttactgttgcatttgcagaaacttccattgctttaaaccttgaagtttttagcatatgt

SEQ ID NO: 2027 - DNA, 200 bp, Amaranthus palmeri
atatcgagtctttggctgtttgtttaaacaaggataaggctctttttactatagaagtgtgtggaactgacaaggtgttgcgccaagtcgtggaacagcttaacaagcttgttagtgttttgaaggttgaagatctatcgagagagccacaagtggaacgtgaactgatgcttgtaaagcttaattctgatgcaaattcc

SEQ ID NO: 2028 - DNA, 200 bp, Amaranthus palmeri
ggaatttgcatcagaattaagctttacaagcatcagttcacgttccacttgtggctctctcgatagatcttcaaccttcaaaacactaacaagcttgttaagctgttccacgacttggcgcaacaccttgtcagttccacacacttctatagtaaaaagagccttatccttgtttaaacaaacagccaaagactcgatat

SEQ ID NO: 2029 - DNA, 200 bp, Amaranthus palmeri
aaagcttaattctgatgcaaattcccacgcagagctaatgtggctagtggacatcttcagggcaaaaattgtggatatctcagaaagcttggtcactgttgaggtgaccggagatcctggaaagttggctgctgtcctaagaaattttagaaagtttggaatcaaagaaattgcaaggaccggaaagattgctctaaggc

SEQ ID NO: 2030 - DNA, 200 bp, Amaranthus palmeri
gccttagagcaatctttccggtccttgcaatttctttgattccaaactttctaaaatttcttaggacagcagccaactttccaggatctccggtcacctcaacagtgaccaagctttctgagatatccacaatttttgccctgaagatgtccactagccacattagctctgcgtgggaatttgcatcagaattaagcttt

SEQ ID NO: 2031 - DNA, 200 bp, Amaranthus palmeri
aggaccggaaagattgctctaaggcgagaaaagatgggtcagacggctcctttttggagattctctgctgcttcttatccagatctacaagaaaaggctgttgatgctctggccaggcctacgaaacggagcatcaatggtgattctggctcatcttcaagtggtgatgtttatccggtggaaccttatgatggttcgat

SEQ ID NO: 2032 - DNA, 200 bp, Amaranthus palmeri
atcgaaccatcataaggttccaccggataaacatcaccacttgaagatgagccagaatcaccattgatgctccgtttcgtaggcctggccagagcatcaacagccttttcttgtagatctggataagaagcagcagagaatctccaaaaaggagccgtctgacccatcttttctcgccttagagcaatctttccggtcct

SEQ ID NO: 2033 - DNA, 200 bp, Amaranthus palmeri
cggtggaaccttatgatggttcgatggttaatcaagtacttgatgctcactggggcgtactttatgacggtgattcaagtggtctccggtcacatacgctgtccatgctggtaaataatgttcccggagttcttaacactgttacaggagtaatttctcgtaggggttataacattcagagtcttgctgtaggccctgct

SEQ ID NO: 2034 - DNA, 200 bp, Amaranthus palmeri
agcagggcctacagcaagactctgaatgttataacccctacgagaaattactcctgtaacagtgttaagaactccgggaacattatttaccagcatggacagcgtatgtgaccggagaccacttgaatcaccgtcataaagtacgccccagtgagcatcaagtacttgattaaccatcgaaccatcataaggttccaccg

SEQ ID NO: 2035 - DNA, 200 bp, Amaranthus palmeri
tcagagtcttgctgtaggccctgctgaaaaggagggtctttctcgtatcacaactgtcattcctggaaacgacgagtcgattggaaaattggttcagcaatttaacaagttaatagaccttcatgagattcaggatctactcaccagccattttcagagcgagagcttatgttgatcaaaatagctgcaaatactacagc

SEQ ID NO: 2036 - DNA, 200 bp, Amaranthus palmeri
gctgtagtatttgcagctattttgatcaacataagctctcgctctgaaaatggctggtgagtagatcctgaatctcatgaaggtctattaacttgttaaattgctgaaccaattttccaatcgactcgtcgtttccaggaatgacagttgtgatacgagaaagaccctccttttcagcagggcctacagcaagactctga

SEQ ID NO: 2037 - DNA, 200 bp, Amaranthus palmeri
tcaaaatagctgcaaatactacagccaggagagatgtccttgatattgctaatatattccgtgcaaaacctgtggatgtttctgatcacacaataacattacaacttgccggtgatttagacaaaatggttgcgctacagagattattggagccttacggcatctgtgaggtggcacggactggaagagtagcactagct

SEQ ID NO: 2038 - DNA, 200 bp, Amaranthus palmeri
agctagtgctactcttccagtccgtgccacctcacagatgccgtaaggctccaataatctctgtagcgcaaccattttgtctaaatcaccggcaagttgtaatgttattgtgtgatcagaaacatccacaggttttgcacggaatatattagcaatatcaaggacatctctcctggctgtagtatttgcagctattttga

SEQ ID NO: 2039 - DNA, 200 bp, Amaranthus palmeri
acggactggaagagtagcactagctcgagagtctagggtagattccaagtatttacgaggatacactcttccgttgtatgaatgaaaaactccggctatgtctttccgacattaccttgtccgattccttccgctcttctacactgcactacgggcagaacaattgcccacgagtagagtaaactaaaaggagaagcaac

SEQ ID NO: 2040 - DNA, 200 bp, Amaranthus palmeri
gttgcttctccttttagtttactctactcgtgggcaattgttctgcccgtagtgcagtgtagaagagcggaaggaatcggacaaggtaatgtcggaaagacatagccggagtttttcattcatacaacggaagagtgtatcctcgtaaatacttggaatctaccctagactctcgagctagtgctactcttccagtccgt

SEQ ID NO: 2041 - DNA, 200 bp, Amaranthus palmeri
acatatgctaaaaacttcaaggtttaaagcaatggaagtttctgcaaatgcaacagtaaatatagttctgtttcagctcattctagggtgatgcgccacacaatttcagtctttgttggggatgaaagtggtataatcaataggattgccggcgttatttctaggagaggatacaacatagagtctctggctgttggttt

SEQ ID NO: 2042 - DNA, 200 bp, Amaranthus palmeri
aaaccaacagccagagactctatgttgtatcctctcctagaaataacgccggcaatcctattgattataccactttcatccccaacaaagactgaaattgtgtggcgcatcaccctagaatgagctgaaacagaactatatttactgttgcatttgcagaaacttccattgctttaaaccttgaagtttttagcatatgt

SEQ ID NO: 2043 - DNA, 200 bp, Amaranthus palmeri
acatagagtctctggctgttggtttaaataaggataaggctctttttactatagtagtgtgtgggactgacaaggtgttgcgccaagtaatggagcagctcagcaagcttgttaatgtcttaaaggttgaagatctatctagagagcctcaagtggaacgtgaacttatgcttttaaagcttcattctaatgcagatacc

SEQ ID NO: 2044 - DNA, 200 bp, Amaranthus palmeri
ggtatctgcattagaatgaagctttaaaagcataagttcacgttccacttgaggctctctagatagatcttcaacctttaagacattaacaagcttgctgagctgctccattacttggcgcaacaccttgtcagtcccacacactactatagtaaaaagagccttatccttatttaaaccaacagccagagactctatgt

SEQ ID NO: 2045 - DNA, 200 bp, Amaranthus palmeri
aaagcttcattctaatgcagatacccatgctgagataatgtggttagtggacatcttcagggcaaaaattgtcgatatgtcggaaagcttcgttactgtagaggtgactggcgatcctggaaagatggctgctgtcctgagaaattttagcaagtatggaatcaaagaagttgccagaacaggaaagattgctctaagac

SEQ ID NO: 2046 - DNA, 200 bp, Amaranthus palmeri
gtcttagagcaatctttcctgttctggcaacttctttgattccatacttgctaaaatttctcaggacagcagccatctttccaggatcgccagtcacctctacagtaacgaagctttccgacatatcgacaatttttgccctgaagatgtccactaaccacattatctcagcatgggtatctgcattagaatgaagcttt

SEQ ID NO: 2047 - DNA, 200 bp, Amaranthus palmeri
agaacaggaaagattgctctaagacgagaaaggatgggcgagacagctcctttttggagattctctgctgcatcttatccagatctagaagaaaaggctgttgaatcttttgtcaggcctgcaaaagaagcatcaatgctgatcctggctcatcgtctagtggtgatgtttatccagtggaaccttatgaagcctccata

SEQ ID NO: 2048 - DNA, 200 bp, Amaranthus palmeri
tatggaggcttcataaggttccactggataaacatcaccactagacgatgagccaggatcagcattgatgcttcttttgcaggcctgacaaaagattcaacagccttttcttctagatctggataagatgcagcagagaatctccaaaaaggagctgtctcgcccatcctttctcgtcttagagcaatctttcctgttct

SEQ ID NO: 2049 - DNA, 200 bp, Amaranthus palmeri
agtggaaccttatgaagcctccataaatacagtacttgatgctcactggggagttctttacgaagatgattcaagcggacttgtgtcacatactctgtccatgctggtaaataatgctcctggagttctgaacaccgttacaggagtaattgctcgtagaggttataacattcagagtcttgctgtgggccctgctgaaa

SEQ ID NO: 2050 - DNA, 200 bp, Amaranthus palmeri
tttcagcagggcccacagcaagactctgaatgttataacctctacgagcaattactcctgtaacggtgttcagaactccaggagcattatttaccagcatggacagagtatgtgacacaagtccgcttgaatcatcttcgtaaagaactccccagtgagcatcaagtactgtatttatggaggcttcataaggttccact

SEQ ID NO: 2051 - DNA, 200 bp, Amaranthus palmeri
agtcttgctgtgggccctgctgaaaaggagggtctttctcgtatcacaactgttgttcctggaaacgacgagtcaattgcaaaattggttcagcaattaaacaaattagtagaccttcatgagattcaggaccttacgcaccagccatttgcagagcgagagcttatgttaattaaagtagcggcaaatacttcggccag

SEQ ID NO: 2052 - DNA, 200 bp, Amaranthus palmeri
ctggccgaagtatttgccgctactttaattaacataagctctcgctctgcaaatggctggtgcgtaaggtcctgaatctcatgaaggtctactaatttgtttaattgctgaaccaattttgcaattgactcgtcgtttccaggaacaacagttgtgatacgagaaagaccctccttttcagcagggcccacagcaagact

SEQ ID NO: 2053 - DNA, 200 bp, Amaranthus palmeri
aagtagcggcaaatacttcggccaggagagacgtccttgatattgctaatatattccgtgcaaaacctgtggatgtttctgatcacacaataacattacaacttgccggtgatttagacaaaatggttgcgctacagagattattggagccttacggcatctgtgaggtggcacggactggaagagtagcactagctcga

SEQ ID NO: 2054 - DNA, 200 bp, Amaranthus palmeri
tcgagctagtgctactcttccagtccgtgccacctcacagatgccgtaaggctccaataatctctgtagcgcaaccattttgtctaaatcaccggcaagttgtaatgttattgtgtgatcagaaacatccacaggttttgcacggaatatattagcaatatcaaggacgtctctcctggccgaagtatttgccgctactt

SEQ ID NO: 2055 - DNA, 200 bp, Amaranthus palmeri
gactggaagagtagcactagctcgagagtctagggtagattccaagtatttacgaggatacactcttccgttgtatgaatgaaaaactccggctatgtctttccgacattaccttgtccgattccttccgctcttctacactgcactacgggcagaacaattgcccacgagtagagtaaactaaaaggagaagcaacaat

SEQ ID NO: 2056 - DNA, 200 bp, Amaranthus palmeri
attgttgcttctccttttagtttactctactcgtgggcaattgttctgcccgtagtgcagtgtagaagagcggaaggaatcggacaaggtaatgtcggaaagacatagccggagtttttcattcatacaacggaagagtgtatcctcgtaaatacttggaatctaccctagactctcgagctagtgctactcttccagtc

SEQ ID NO: 2057 - DNA, 200 bp, Amaranthus palmeri
ataatattatctttttggaataatataattaaaagcaacaaacaaaatgtataaatttaactaatatacttaattcaaaaaaaaaaataaattcaattaatataccagtaagcagtaagtgtgtttcgcatttcagtatttgaataatattatctttttggaatgattataattaaaagcaacaaaagttataattttaa

SEQ ID NO: 2058 - DNA, 200 bp, Amaranthus palmeri
ttaaaattataacttttgttgcttttaattataatcattccaaaaagataatattattcaaatactgaaatgcgaaacacacttactgcttactggtatattaattgaatttatttttttttttgaattaagtatattagttaaatttatacattttgtttgttgcttttaattatattattccaaaaagataatattat

SEQ ID NO: 2059 - DNA, 200 bp, Amaranthus palmeri
aaagcaacaaaagttataattttaattaatatatatacaagtaagtgtgttttgcatttcaatatttcaataaaaaattataagtgagttgtctatttataataaaataaataatgcactactcatattcttcttcaaaaaaatcctcactaccatctccattgtccccatttcatttctttctcatatctctccaatgg

SEQ ID NO: 2060 - DNA, 200 bp, Amaranthus palmeri
ccattggagagatatgagaaagaaatgaaatggggacaatggagatggtagtgaggatttttttgaagaagaatatgagtagtgcattatttattttattataaatagacaactcacttataattttttattgaaatattgaaatgcaaaacacacttacttgtatatatattaattaaaattataacttttgttgcttt

SEQ ID NO: 2061 - DNA, 200 bp, Amaranthus palmeri
tttctttctcatatctctccaatggcggccatttcctttaacattaatggcggaaagattggaactttatgtccaaaacctaaatatggttgtgggtttttgagaaaatgggattttggagctcattcaactgtatctacaaaacccatgtcaaaaattttaagcttgaaagcagttgaagtttctgctgatgctacagt

SEQ ID NO: 2062 - DNA, 200 bp, Amaranthus palmeri
actgtagcatcagcagaaacttcaactgctttcaagcttaaaatttttgacatgggttttgtagatacagttgaatgagctccaaaatcccattttctcaaaaacccacaaccatatttaggttttggacataaagttccaatctttccgccattaatgttaaaggaaatggccgccattggagagatatgagaaagaaa

SEQ ID NO: 2063 - DNA, 200 bp, Amaranthus palmeri
ttgaagtttctgctgatgctacagtaaatgcagtttctgtttcagctaattctaggtaatgtacttaattaatattaccatttttcattgaatctaaactttttttcttcatgtggaattgtggatataggagtatgtatggaaagaaatataagggtttttgcttctttattggtgtttgtttaaaaaattgtatggtt

SEQ ID NO: 2064 - DNA, 200 bp, Amaranthus palmeri
aaccatacaattttttaaacaaacaccaataaagaagcaaaaacccttatatttctttccatacatactcctatatccacaattccacatgaagaaaaaaagtttagattcaatgaaaaatggtaatattaattaagtacattacctagaattagctgaaacagaaactgcatttactgtagcatcagcagaaacttcaa

SEQ ID NO: 2065 - DNA, 200 bp, Amaranthus palmeri
tgtttgtttaaaaaattgtatggttgcatacttttgtgattattcatttattctgagcatgtttaacatgttcgattgtacaacctctaaaaaattgaatgcaaaagatacaaaattgttagaaaatatcataatttttaaaatttcatggggtcttaaaataattgaaattttcaatttttgctccggccctgatcctc

SEQ ID NO: 2066 - DNA, 200 bp, Amaranthus palmeri
gaggatcagggccggagcaaaaattgaaaatttcaattattttaagaccccatgaaattttaaaaattatgatattttctaacaattttgtatcttttgcattcaattttttagaggttgtacaatcgaacatgttaaacatgctcagaataaatgaataatcacaaaagtatgcaaccatacaattttttaaacaaaca

SEQ ID NO: 2067 - DNA, 200 bp, Amaranthus palmeri
aatttttgctccggccctgatcctcctaaagctcactctataaggagtcaccaaaaagtaaagttgagtataatagtcatgtgactctaattttagcctaggtggaagaaatagggtcaaggtcaatggaatgttgtttgtttgtttgtttgttctggtatcattacaatttacagatatgaagttaataaggttttgga

SEQ ID NO: 2068 - DNA, 200 bp, Amaranthus palmeri
tccaaaaccttattaacttcatatctgtaaattgtaatgataccagaacaaacaaacaaacaaacaacattccattgaccttgaccctatttcttccacctaggctaaaattagagtcacatgactattatactcaactttactttttggtgactccttatagagtgagctttaggaggatcagggccggagcaaaaatt

SEQ ID NO: 2069 - DNA, 200 bp, Amaranthus palmeri
gatatgaagttaataaggttttggattatattgtaccatattaaattggcttattagactatgtgtacttttatttatgtgaaattgagatgatgtttgctgccaaacgccaatcgaaaacagatatatactatcattaacaagggtaaatgtgaggttatttgatggcattgaggtgatataacattgtatgaagttgc

SEQ ID NO: 2070 - DNA, 200 bp, Amaranthus palmeri
gcaacttcatacaatgttatatcacctcaatgccatcaaataacctcacatttacccttgttaatgatagtatatatctgttttcgattggcgtttggcagcaaacatcatctcaatttcacataaataaaagtacacatagtctaataagccaatttaatatggtacaatataatccaaaaccttattaacttcatatc

SEQ ID NO: 2071 - DNA, 200 bp, Amaranthus palmeri
gtgatataacattgtatgaagttgcaaattatgaagcttaatcttgtattaagtgggagatagagcatcttttggttgtgatgttataactttagttggattttgtaagtgttgttgcaagttattcatgaattaaggagatgtgcctttctatgtgaatcacatatgtaagaagtagtttatgtgtttgttgatcttta

SEQ ID NO: 2072 - DNA, 200 bp, Amaranthus palmeri
taaagatcaacaaacacataaactacttcttacatatgtgattcacatagaaaggcacatctccttaattcatgaataacttgcaacaacacttacaaaatccaactaaagttataacatcacaaccaaaagatgctctatctcccacttaatacaagattaagcttcataatttgcaacttcatacaatgttatatcac

SEQ ID NO: 2073 - DNA, 200 bp, Amaranthus palmeri
tagtttatgtgtttgttgatctttatactgtatgatggccgattcaaatgtggaagttgatatgatccttttaaggtctactgagaagttgttcttcaattcattatattatccttggttttcgaccataggaggtcacatgttcgaatctagcctcatatataacatatcttgaggcttcaaccatcaacttaaacttt

SEQ ID NO: 2074 - DNA, 200 bp, Amaranthus palmeri
aaagtttaagttgatggttgaagcctcaagatatgttatatatgaggctagattcgaacatgtgacctcctatggtcgaaaaccaaggataatataatgaattgaagaacaacttctcagtagaccttaaaaggatcatatcaacttccacatttgaatcggccatcatacagtataaagatcaacaaacacataaacta

SEQ ID NO: 2075 - DNA, 200 bp, Amaranthus palmeri
ggcttcaaccatcaacttaaactttgattgagttgcttccctgtgactttctcgccttcgcttcacctttatgcttggtttcagccttgctaagttgctagtcgtggagagggttacttcaagaagggtgtcagcatatatcactgcagatttttttgaatacaaaatcgtttttaaagaaatcatacatggttatctta

SEQ ID NO: 2076 - DNA, 200 bp, Amaranthus palmeri
taagataaccatgtatgatttctttaaaaacgattttgtattcaaaaaaatctgcagtgatatatgctgacacccttcttgaagtaaccctctccacgactagcaacttagcaaggctgaaaccaagcataaaggtgaagcgaaggcgagaaagtcacagggaagcaactcaatcaaagtttaagttgatggttgaagcc

SEQ ID NO: 2077 - DNA, 200 bp, Amaranthus palmeri
aaagaaatcatacatggttatcttactgctccttgattcgatggagcaaagttttgttgttatttgatttccgattataatggatcattgtaaaacgactctttaaattctgcgcacttcttatttatgtaaagttgcaaatgatgtttgctatatatgtggttatcttattgtatcttgttatttattctcaggtaatg

SEQ ID NO: 2078 - DNA, 200 bp, Amaranthus palmeri
cattacctgagaataaataacaagatacaataagataaccacatatatagcaaacatcatttgcaactttacataaataagaagtgcgcagaatttaaagagtcgttttacaatgatccattataatcggaaatcaaataacaacaaaactttgctccatcgaatcaaggagcagtaagataaccatgtatgatttcttt

SEQ ID NO: 2079 - DNA, 200 bp, Amaranthus palmeri
tcttgttatttattctcaggtaatgaaacagaattcaaactctaatgacatttcatatatttcattttgtgtatacagggtgatgcgtcacacaatttctgtctttgtcggggatgaaagtgggataatcaataggattgcaggtgttatttctagaagaggatacaatatcgagtctttggctgtttgtttaaacaagg

SEQ ID NO: 2080 - DNA, 200 bp, Amaranthus palmeri
ccttgtttaaacaaacagccaaagactcgatattgtatcctcttctagaaataacacctgcaatcctattgattatcccactttcatccccgacaaagacagaaattgtgtgacgcatcaccctgtatacacaaaatgaaatatatgaaatgtcattagagtttgaattctgtttcattacctgagaataaataacaaga

SEQ ID NO: 2081 - DNA, 200 bp, Amaranthus palmeri
tctttggctgtttgtttaaacaaggataaggctctttttactatagaagtgtgtggaactgacaaggtgttgcgccaagtcgtggaacagcttaacaagcttgttagtgttttgaaggtagttaatttcctttgttcttccttttattggtaaatggtgatagtgatacccttgtaacataaatcttcgaataatgagac

SEQ ID NO: 2082 - DNA, 200 bp, Amaranthus palmeri
gtctcattattcgaagatttatgttacaagggtatcactatcaccatttaccaataaaaggaagaacaaaggaaattaactaccttcaaaacactaacaagcttgttaagctgttccacgacttggcgcaacaccttgtcagttccacacacttctatagtaaaaagagccttatccttgtttaaacaaacagccaaaga

SEQ ID NO: 2083 - DNA, 200 bp, Amaranthus palmeri
aacataaatcttcgaataatgagactatgacatagtgcttggttcaccactttacggattgcgttcgataaaattactttatgaggtctaatgaacccgttttccaaactagcttatacaaactaaacatatcctgaatttgttttttactaaaataaaaaaaaattcttttaatatggagcgttacgtatcaatcaata

SEQ ID NO: 2084 - DNA, 200 bp, Amaranthus palmeri
tattgattgatacgtaacgctccatattaaaagaatttttttttattttagtaaaaaacaaattcaggatatgtttagtttgtataagctagtttggaaaacgggttcattagacctcataaagtaattttatcgaacgcaatccgtaaagtggtgaaccaagcactatgtcatagtctcattattcgaagatttatgtt

SEQ ID NO: 2085 - DNA, 200 bp, Amaranthus palmeri
atggagcgttacgtatcaatcaatataatggatcatcttatatgcatatgtttgtacaatgtacattttttgttagattgtctatttgtcctgataacaaccttggatgattcttgtatttcttgtaggttgaagatctatcgagagagccacaagtggaacgtgaactgatgcttgtaaagcttaattctgatgcaaat

SEQ ID NO: 2086 - DNA, 200 bp, Amaranthus palmeri
atttgcatcagaattaagctttacaagcatcagttcacgttccacttgtggctctctcgatagatcttcaacctacaagaaatacaagaatcatccaaggttgttatcaggacaaatagacaatctaacaaaaaatgtacattgtacaaacatatgcatataagatgatccattatattgattgatacgtaacgctccat

SEQ ID NO: 2087 - DNA, 200 bp, Amaranthus palmeri
tgtaaagcttaattctgatgcaaattcccacgcagaggtagttccaaaaattcaatgataatttatgaatggtatattttccactttttaagttctaatttcctcggctgttgtcagttagagtctagcaaggaaaaagatagagatgttttgctttagattttatcgatgatcgagaaagatgctatacttcatataag

SEQ ID NO: 2088 - DNA, 200 bp, Amaranthus palmeri
cttatatgaagtatagcatctttctcgatcatcgataaaatctaaagcaaaacatctctatctttttccttgctagactctaactgacaacagccgaggaaattagaacttaaaaagtggaaaatataccattcataaattatcattgaatttttggaactacctctgcgtgggaatttgcatcagaattaagctttaca

SEQ ID NO: 2089 - DNA, 200 bp, Amaranthus palmeri
agaaagatgctatacttcatataaggccatgactgttacaacaacaacgccagagctttagtcccaaaagttcatggctgttagatagtttaaatttaactagaagtacatcgtgttgtgtgaagctcgtataagaaattgcattagtgtctttgtgagaaatctaataccgattaacgtaaatttttaatttttgatct

SEQ ID NO: 2090 - DNA, 200 bp, Amaranthus palmeri
agatcaaaaattaaaaatttacgttaatcggtattagatttctcacaaagacactaatgcaatttcttatacgagcttcacacaacacgatgtacttctagttaaatttaaactatctaacagccatgaacttttgggactaaagctctggcgttgttgttgtaacagtcatggccttatatgaagtatagcatctttct

SEQ ID NO: 2091 - DNA, 200 bp, Amaranthus palmeri
aacgtaaatttttaatttttgatcttcagctaatgtggctagtggacatcttcagggcaaaaattgtggatatctcagaaagcttggtcactgttgaggttagtggtatatttgtttgacttctcgcgtatctcttctatgtttgctgaattaagtccgatttttttggatttgcttccatgataaatgcaagaaattta

SEQ ID NO: 2092 - DNA, 200 bp, Amaranthus palmeri
taaatttcttgcatttatcatggaagcaaatccaaaaaaatcggacttaattcagcaaacatagaagagatacgcgagaagtcaaacaaatataccactaacctcaacagtgaccaagctttctgagatatccacaatttttgccctgaagatgtccactagccacattagctgaagatcaaaaattaaaaatttacgtt

SEQ ID NO: 2093 - DNA, 200 bp, Amaranthus palmeri
ttccatgataaatgcaagaaatttacctacaagaagttgaccattttcctccggtcgatgtaaaatctttttccttattggcattttctttggtgctgtgcaggtgaccggagatcctggaaagttggctgctgtcctaagaaattttagaaagtttggaatcaaagaaattgcaaggaccggaaaggttagtcttttag

SEQ ID NO: 2094 - DNA, 200 bp, Amaranthus palmeri
ctaaaagactaacctttccggtccttgcaatttctttgattccaaactttctaaaatttcttaggacagcagccaactttccaggatctccggtcacctgcacagcaccaaagaaaatgccaataaggaaaaagattttacatcgaccggaggaaaatggtcaacttcttgtaggtaaatttcttgcatttatcatggaa

SEQ ID NO: 2095 - DNA, 200 bp, Amaranthus palmeri
aggaccggaaaggttagtcttttagacatttgcagtaaattcagcatagaattcggaaagccgcaaagagcacatgtcaactattgtggctagccagccaactattatgcatttctggtgagatcaatgtgaaacaagtttagctaactacttgttttgttttatacttaatatgatagattgctctaaggcgagaaaag

SEQ ID NO: 2096 - DNA, 200 bp, Amaranthus palmeri
cttttctcgccttagagcaatctatcatattaagtataaaacaaaacaagtagttagctaaacttgtttcacattgatctcaccagaaatgcataatagttggctggctagccacaatagttgacatgtgctctttgcggctttccgaattctatgctgaatttactgcaaatgtctaaaagactaacctttccggtcct

SEQ ID NO: 2097 - DNA, 200 bp, Amaranthus palmeri
atagattgctctaaggcgagaaaagatgggtcagacggctcctttttggagattctctgctgcttcttatccagatctacaagaaaaggctgttgatgctctggccaagcctacgaaacggagtatcaatggtgattctggctcatcttcaagtgtaagtgatattttatcttctcgacaattatctttttccttttctt

SEQ ID NO: 2098 - DNA, 200 bp, Amaranthus palmeri
aagaaaaggaaaaagataattgtcgagaagataaaatatcacttacacttgaagatgagccagaatcaccattgatactccgtttcgtaggcttggccagagcatcaacagccttttcttgtagatctggataagaagcagcagagaatctccaaaaaggagccgtctgacccatcttttctcgccttagagcaatctat

SEQ ID NO: 2099 - DNA, 200 bp, Amaranthus palmeri
cgacaattatctttttccttttcttaccttgcattgcctatgtatacttcgttcaccttgtattgcctatagacttaaacatgcttttatttttgaagggtgatgtttatccggtggaaccttatgatggttcgatggttaatcaagtgcttgatgctcactggggcgtactttatgatggtgatgtaagtgctctatca

SEQ ID NO: 2100 - DNA, 200 bp, Amaranthus palmeri
tgatagagcacttacatcaccatcataaagtacgccccagtgagcatcaagcacttgattaaccatcgaaccatcataaggttccaccggataaacatcacccttcaaaaataaaagcatgtttaagtctataggcaatacaaggtgaacgaagtatacataggcaatgcaaggtaagaaaaggaaaaagataattgtcg

SEQ ID NO: 2101 - DNA, 200 bp, Amaranthus palmeri
tgatggtgatgtaagtgctctatcactacctgaattttttgtcactaggttgtccaacggtccatgtgatgtcatgttcaaatcgcttagcccagtgttttctaatatagctccaaattaattgtctggattcacgattcacccaaaatggcctaaattttttcgttttaatttacaattgtccaagtcatgtcaaacat

SEQ ID NO: 2102 - DNA, 200 bp, Amaranthus palmeri
atgtttgacatgacttggacaattgtaaattaaaacgaaaaaatttaggccattttgggtgaatcgtgaatccagacaattaatttggagctatattagaaaacactgggctaagcgatttgaacatgacatcacatggaccgttggacaacctagtgacaaaaaattcaggtagtgatagagcacttacatcaccatca

SEQ ID NO: 2103 - DNA, 200 bp, Amaranthus palmeri
caattgtccaagtcatgtcaaacatgtattaaggtctaaactctgctctgttacttggactcgggtactgagtcggcaacgtgtccaagtgtcgtatgcgtctaaatattcaattttacgcttaaaatgaagtatctaagtgtcataccaatgtccgggcatcaaggaacggacataggtacgtgaagcaaaatgaagag

SEQ ID NO: 2104 - DNA, 200 bp, Amaranthus palmeri
ctcttcattttgcttcacgtacctatgtccgttccttgatgcccggacattggtatgacacttagatacttcattttaagcgtaaaattgaatatttagacgcatacgacacttggacacgttgccgactcagtacccgagtccaagtaacagagcagagtttagaccttaatacatgtttgacatgacttggacaattg

SEQ ID NO: 2105 - DNA, 200 bp, Amaranthus palmeri
taggtacgtgaagcaaaatgaagagtccgagtaatagcgtttcagcctcctttgaattttggagggttaaagtttatgtttttgggttttcagatgttcgtctttctgttattcatgtttaattttaagaatgaaaggtagttcgacttttcagttttttgagctgcacagtactataaattggttttagtttgctctgc

SEQ ID NO: 2106 - DNA, 200 bp, Amaranthus palmeri
gcagagcaaactaaaaccaatttatagtactgtgcagctcaaaaaactgaaaagtcgaactacctttcattcttaaaattaaacatgaataacagaaagacgaacatctgaaaacccaaaaacataaactttaaccctccaaaattcaaaggaggctgaaacgctattactcggactcttcattttgcttcacgtaccta

SEQ ID NO: 2107 - DNA, 200 bp, Amaranthus palmeri
ataaattggttttagtttgctctgctagtatcatgaattgcttcgttcttcatgccagtcaagtggtctccggtcacatacgctgtccatgctggtaaataatgttcccggagttcttaacactgttacaggagtaatttctcgtaggggttataacattcaggtcagtgtggactctgactacagcaagaaagtatata

SEQ ID NO: 2108 - DNA, 200 bp, Amaranthus palmeri
tatatactttcttgctgtagtcagagtccacactgacctgaatgttataacccctacgagaaattactcctgtaacagtgttaagaactccgggaacattatttaccagcatggacagcgtatgtgaccggagaccacttgactggcatgaagaacgaagcaattcatgatactagcagagcaaactaaaaccaatttat

SEQ ID NO: 2109 - DNA, 200 bp, Amaranthus palmeri
tctgactacagcaagaaagtatataaagccgtttctgttgtgtaatgacaatcgtccccttttcatcctcttcagagtcttgctgtaggccctgctgaaaaggagggtctttctcgtatcacaactgtcattcctggaaacgacgagtcgattggaaaattggttcagcaatttaacaagttagtagaccttcatgaggt

SEQ ID NO: 2110 - DNA, 200 bp, Amaranthus palmeri
acctcatgaaggtctactaacttgttaaattgctgaaccaattttccaatcgactcgtcgtttccaggaatgacagttgtgatacgagaaagaccctccttttcagcagggcctacagcaagactctgaagaggatgaaaaggggacgattgtcattacacaacagaaacggctttatatactttcttgctgtagtcaga

SEQ ID NO: 2111 - DNA, 200 bp, Amaranthus palmeri
acaagttagtagaccttcatgaggtgagcaactatttatgtacaaaaccgaatagttgtaataagtggtatagactacatagtaataactttatggttgtaagatgcaaagtacccttatcagttatcactataatatgttctaagaagctcaaaactgaagtggaagagaaaattgtgacattggttagctccgcgttt

SEQ ID NO: 2112 - DNA, 200 bp, Amaranthus palmeri
aaacgcggagctaaccaatgtcacaattttctcttccacttcagttttgagcttcttagaacatattatagtgataactgataagggtactttgcatcttacaaccataaagttattactatgtagtctataccacttattacaactattcggttttgtacataaatagttgctcacctcatgaaggtctactaacttgt

SEQ ID NO: 2113 - DNA, 200 bp, Amaranthus palmeri
tgtgacattggttagctccgcgtttatgacaaactacttgattaattcttgtttttttgaatgctcagttcaatctcctttgtaatatgttgatgctcgttaagttacctattttctttgtaatacgtaaaccgtgaagttgtgttatcttagtccaacgtcacatcgtgctgctcgagtcatttgatttaaaacgctat

SEQ ID NO: 2114 - DNA, 200 bp, Amaranthus palmeri
atagcgttttaaatcaaatgactcgagcagcacgatgtgacgttggactaagataacacaacttcacggtttacgtattacaaagaaaataggtaacttaacgagcatcaacatattacaaaggagattgaactgagcattcaaaaaaacaagaattaatcaagtagtttgtcataaacgcggagctaaccaatgtcaca

SEQ ID NO: 2115 - DNA, 200 bp, Amaranthus palmeri
atggtaaatcatcactatgcggcctaatttgatgtggcctaatttgataaaaggatatttggtttttttttttaattttttttcttgttttaattattttattaaaatgactgatgattttaaatcaccattattgattaagatttaatataaatcacattgtaaaagcaacacaaaaagcacaaattcaataatatact

SEQ ID NO: 2116 - DNA, 200 bp, Amaranthus palmeri
agtatattattgaatttgtgctttttgtgttgcttttacaatgtgatttatattaaatcttaatcaataatggtgatttaaaatcatcagtcattttaataaaataattaaaacaagaaaaaaaattaaaaaaaaaaaccaaatatccttttatcaaattaggccacatcaaattaggccgcatagtgatgatttaccat

SEQ ID NO: 2117 - DNA, 200 bp, Amaranthus palmeri
aaaagcacaaattcaataatatactctttaagtttgtttatcttctaattagttcggttaaaacggttccccactttcttctccgactctcacaattatcttcccctattcatttttcttccaccctctctaatggcggctgtttccttcaatatcaatggtggaaagattggaactttatgttcaagacacgaattcgt

SEQ ID NO: 2118 - DNA, 200 bp, Amaranthus palmeri
acgaattcgtgtcttgaacataaagttccaatctttccaccattgatattgaaggaaacagccgccattagagagggtggaagaaaaatgaataggggaagataattgtgagagtcggagaagaaagtggggaaccgttttaaccgaactaattagaagataaacaaacttaaagagtatattattgaatttgtgctttt

SEQ ID NO: 2119 - DNA, 200 bp, Amaranthus palmeri
ctttatgttcaagacacgaattcgtttgtgggtttgtaagaaaatttcattttagaactcatacttctatatttgaaaaacatatgccaaaaacttcaaggtttaaagcaatggaagtttctgcaaatgcaacagtaaatatagttcctgtttcagctcattctaggtaattttatttctcgaaaatttttgatttacaa

SEQ ID NO: 2120 - DNA, 200 bp, Amaranthus palmeri
ttgtaaatcaaaaattttcgagaaataaaattacctagaatgagctgaaacaggaactatatttactgttgcatttgcagaaacttccattgctttaaaccttgaagtttttggcatatgtttttcaaatatagaagtatgagttctaaaatgaaattttcttacaaacccacaaacgaattcgtgtcttgaacataaag

SEQ ID NO: 2121 - DNA, 200 bp, Amaranthus palmeri
tttctcgaaaatttttgatttacaattaaattaatcttgttttgtaggtaatgaattgcagatgaaatagatggattcttatttgtttattggtatttgtttataaatttttgtttatattagtttctgaattgtgattattctgattgtatgtcaaggtttaggttgttactaaatgtaaattggattgattgaagttg

SEQ ID NO: 2122 - DNA, 200 bp, Amaranthus palmeri
caacttcaatcaatccaatttacatttagtaacaacctaaaccttgacatacaatcagaataatcacaattcagaaactaatataaacaaaaatttataaacaaataccaataaacaaataagaatccatctatttcatctgcaattcattacctacaaaacaagattaatttaattgtaaatcaaaaattttcgagaaa

SEQ ID NO: 2123 - DNA, 200 bp, Amaranthus palmeri
atgtaaattggattgattgaagttgcaataaggtgatggcgtgatgctgattgttgtaaatttttgtttatattagtatagtactacttattgacctaagttcttttacatagtaggagatattataacttttgcttgtggactcagggccggccctaagggtgggcaagaggggccgtctcccaatgcccatgtcaaaa

SEQ ID NO: 2124 - DNA, 200 bp, Amaranthus palmeri
ttttgacatgggcattgggagacggcccctcttgcccacccttagggccggccctgagtccacaagcaaaagttataatatctcctactatgtaaaagaacttaggtcaataagtagtactatactaatataaacaaaaatttacaacaatcagcatcacgccatcaccttattgcaacttcaatcaatccaatttacat

SEQ ID NO: 2125 - DNA, 200 bp, Amaranthus palmeri
ccgtctcccaatgcccatgtcaaaaaagcaaaattaatggttatataaggtttatataggttataaattgtaaaggaaaaggacgtcaatgtgtcatttctcccagggccccaaaatatctaggaccggtcctgaaagaaactactcaaaatttgtaggattttctattgagacatttttttttttgtggattaatgatt

SEQ ID NO: 2126 - DNA, 200 bp, Amaranthus palmeri
aatcattaatccacaaaaaaaaaaatgtctcaatagaaaatcctacaaattttgagtagtttctttcaggaccggtcctagatattttggggccctgggagaaatgacacattgacgtccttttcctttacaatttataacctatataaaccttatataaccattaattttgcttttttgacatgggcattgggagacgg

SEQ ID NO: 2127 - DNA, 200 bp, Amaranthus palmeri
tttttttttttgtggattaatgattgaactaagatcaaatagatactatttctgtttgattgaaacttttgggtagccggatgtgtaccggtgtgtgacttctttttgagttggttagttcaattgtattgttagaaatgatcttttctagggtctttggagacattggttctttacttttagtctatgaattatgatag

SEQ ID NO: 2128 - DNA, 200 bp, Amaranthus palmeri
ctatcataattcatagactaaaagtaaagaaccaatgtctccaaagaccctagaaaagatcatttctaacaatacaattgaactaaccaactcaaaaagaagtcacacaccggtacacatccggctacccaaaagtttcaatcaaacagaaatagtatctatttgatcttagttcaatcattaatccacaaaaaaaaaaa

SEQ ID NO: 2129 - DNA, 200 bp, Amaranthus palmeri
acttttagtctatgaattatgatagtgttggtttaaacaccattttgttaccctattgtgattaagtgactcccagctcgattaaatttaggagttatattaatgttgtctttgttagttatattgatggtcggtagttcggttaagtttgtctatgaatacattgattttatccttatttggccaacaaatgtatgtaa

SEQ ID NO: 2130 - DNA, 200 bp, Amaranthus palmeri
ttacatacatttgttggccaaataaggataaaatcaatgtattcatagacaaacttaaccgaactaccgaccatcaatataactaacaaagacaacattaatataactcctaaatttaatcgagctgggagtcacttaatcacaatagggtaacaaaatggtgtttaaaccaacactatcataattcatagactaaaagt

SEQ ID NO: 2131 - DNA, 200 bp, Amaranthus palmeri
ttatttggccaacaaatgtatgtaatttaggaaagttatatgatttaccactttgtatttgtatctctgttattttctttcttcttttcttgatgtgttggttggataaaaggaatttggagggaaagaaaggaaagagaaatagagggatgagactttgtcatatgtatatcaaatagagatgggaaatggaggggagg

SEQ ID NO: 2132 - DNA, 200 bp, Amaranthus palmeri
cctcccctccatttcccatctctatttgatatacatatgacaaagtctcatccctctatttctctttcctttctttccctccaaattccttttatccaaccaacacatcaagaaaagaagaaagaaaataacagagatacaaatacaaagtggtaaatcatataactttcctaaattacatacatttgttggccaaataa

SEQ ID NO: 2133 - DNA, 200 bp, Amaranthus palmeri
atagagatgggaaatggaggggagggaataataacaatgaattccttctattttttttgaaaccaatccctccattattagaaagttttatattaaaaactcaccgctttccctcccctactccttcctttctagtctctcccccctcccacccttcaatagcttatcctttcatgccgtccaacaaaatttgaactcat

SEQ ID NO: 2134 - DNA, 200 bp, Amaranthus palmeri
atgagttcaaattttgttggacggcatgaaaggataagctattgaagggtgggaggggggagagactagaaaggaaggagtaggggagggaaagcggtgagtttttaatataaaactttctaataatggagggattggtttcaaaaaaaatagaaggaattcattgttattattccctcccctccatttcccatctctat

SEQ ID NO: 2135 - DNA, 200 bp, Amaranthus palmeri
gccgtccaacaaaatttgaactcatatccttgtgtatgatcggagaaagtaatgactgaatcattcatgaagctcatccttggtgaatttatctctttttatccagtctttgagtctcgtggttcaggaacgctgccaaatctcttgaataaaagtcattttaaattatcatatgtatcacattctatgctgtttttttt

SEQ ID NO: 2136 - DNA, 200 bp, Amaranthus palmeri
aaaaaaaacagcatagaatgtgatacatatgataatttaaaatgacttttattcaagagatttggcagcgttcctgaaccacgagactcaaagactggataaaaagagataaattcaccaaggatgagcttcatgaatgattcagtcattactttctccgatcatacacaaggatatgagttcaaattttgttggacggc

SEQ ID NO: 2137 - DNA, 200 bp, Amaranthus palmeri
tatcacattctatgctgtttttttttcttgtattttgctatcattagaatggtaataaaatgtattttcattcttttccagggtgatgcgccacacaatttcagtctttgttggggatgaaagtggtataatcaataggattgccggcgttatttctaggagaggatacaacatagagtctctggctgttggtttaaata

SEQ ID NO: 2138 - DNA, 200 bp, Amaranthus palmeri
tatttaaaccaacagccagagactctatgttgtatcctctcctagaaataacgccggcaatcctattgattataccactttcatccccaacaaagactgaaattgtgtggcgcatcaccctggaaaagaatgaaaatacattttattaccattctaatgatagcaaaatacaagaaaaaaaaacagcatagaatgtgata

SEQ ID NO: 2139 - DNA, 200 bp, Amaranthus palmeri
gagtctctggctgttggtttaaataaggataaggctctttttactatagtagtgtgtgggactgacaaggtgttgcgccaagtaatggaacagctcagcaagcttgttaatgtcataaaggtagtcatctccttttttcttactttaaggtaactagtgatactttcatttagtagtggcggtcaatggtgattctaacc

SEQ ID NO: 2140 - DNA, 200 bp, Amaranthus palmeri
ggttagaatcaccattgaccgccactactaaatgaaagtatcactagttaccttaaagtaagaaaaaaggagatgactacctttatgacattaacaagcttgctgagctgttccattacttggcgcaacaccttgtcagtcccacacactactatagtaaaaagagccttatccttatttaaaccaacagccagagactc

SEQ ID NO: 2141 - DNA, 200 bp, Amaranthus palmeri
gtggcggtcaatggtgattctaaccatgcatgttcatattgtttgtgcaatattgctcattttgagtctttgactttatcattgttgttaaactttgagagaatataatctcgagagcatctatcctcattttaagatagatagagcaggaaaacactcatgattctttaataaactttcaaaatattaaaattcccttg

SEQ ID NO: 2142 - DNA, 200 bp, Amaranthus palmeri
caagggaattttaatattttgaaagtttattaaagaatcatgagtgttttcctgctctatctatcttaaaatgaggatagatgctctcgagattatattctctcaaagtttaacaacaatgataaagtcaaagactcaaaatgagcaatattgcacaaacaatatgaacatgcatggttagaatcaccattgaccgccac

SEQ ID NO: 2143 - DNA, 200 bp, Amaranthus palmeri
ctttcaaaatattaaaattcccttgccctaatgcaattttatagctcccagctaatccgagttcaaggggttcgagtgtatgcaaccatactcatataacaacaaaatggttgattcagattgacccttaaaatcaaataccatcttgcaaattcacttaaacacatactttaacgacccgttttatagtagtccattaa

SEQ ID NO: 2144 - DNA, 200 bp, Amaranthus palmeri
ttaatggactactataaaacgggtcgttaaagtatgtgtttaagtgaatttgcaagatggtatttgattttaagggtcaatctgaatcaaccattttgttgttatatgagtatggttgcatacactcgaaccccttgaactcggattagctgggagctataaaattgcattagggcaagggaattttaatattttgaaag

SEQ ID NO: 2145 - DNA, 200 bp, Amaranthus palmeri
gacccgttttatagtagtccattaaaattcgaaagcaaagaattataaaatcttttattccatcgagaatagacacaataatcttcaaagcaatgtctataaaaagtttgtcgtgtcaccgtatcgtaacttaattgtaagggccttcaattttactgccatcaaaatataggttgagacccacaaaaccatttacatag

SEQ ID NO: 2146 - DNA, 200 bp, Amaranthus palmeri
ctatgtaaatggttttgtgggtctcaacctatattttgatggcagtaaaattgaaggcccttacaattaagttacgatacggtgacacgacaaactttttatagacattgctttgaagattattgtgtctattctcgatggaataaaagattttataattctttgctttcgaattttaatggactactataaaacgggtc

SEQ ID NO: 2147 - DNA, 200 bp, Amaranthus palmeri
gagacccacaaaaccatttacatagacaagagccatttcactaccattatcataaccatgattgagaccgcatttgtgcacaatggtcaagtgacattcttcagcaatacttagagcttgaattggaggaatttgtataatgatctacttatgtaacaaattcttgataatgttgtcacatatagtggggagaaatttga

SEQ ID NO: 2148 - DNA, 200 bp, Amaranthus palmeri
tcaaatttctccccactatatgtgacaacattatcaagaatttgttacataagtagatcattatacaaattcctccaattcaagctctaagtattgctgaagaatgtcacttgaccattgtgcacaaatgcggtctcaatcatggttatgataatggtagtgaaatggctcttgtctatgtaaatggttttgtgggtctc

SEQ ID NO: 2149 - DNA, 200 bp, Amaranthus palmeri
tcacatatagtggggagaaatttgaaggtcacaaagctaccacatgtaactgaatgcatctattgcagtcaaacctgatggcagacaactgtcaaggcagtcttttgtaaggaacctttagaaggtatcttttaaagaaaaaaaatttgtcgttagtttttaaaaaaagttaaaaattattttcttgaaaattttctttt

SEQ ID NO: 2150 - DNA, 200 bp, Amaranthus palmeri
aaaagaaaattttcaagaaaataatttttaactttttttaaaaactaacgacaaattttttttctttaaaagataccttctaaaggttccttacaaaagactgccttgacagttgtctgccatcaggtttgactgcaatagatgcattcagttacatgtggtagctttgtgaccttcaaatttctccccactatatgtga

SEQ ID NO: 2151 - DNA, 200 bp, Amaranthus palmeri
attattttcttgaaaattttctttttaagtaaaataagtgtggtaaaatggacattatgttggaacttagaatttttagtaatagcttgttaattagcatgggaagtgattaatgaagttttatgtccattaggtaataatgtgtgaagtattcttatatgtattattgctgcactttccatttgatggtgcgcatcagg

SEQ ID NO: 2152 - DNA, 200 bp, Amaranthus palmeri
cctgatgcgcaccatcaaatggaaagtgcagcaataatacatataagaatacttcacacattattacctaatggacataaaacttcattaatcacttcccatgctaattaacaagctattactaaaaattctaagttccaacataatgtccattttaccacacttattttacttaaaaagaaaattttcaagaaaataat

SEQ ID NO: 2153 - DNA, 200 bp, Amaranthus palmeri
tttccatttgatggtgcgcatcagggcatgcaatagtactttttttgatctaacatatatgtccttacttatgctatatgctcgcagctaagtattccttactaaaggtgttttacggggcgattcgactaacgggttaagggtcgggtcacattttaacgggtcatcaacggattaggttaataaagggtcgggccatt

SEQ ID NO: 2154 - DNA, 200 bp, Amaranthus palmeri
aatggcccgaccctttattaacctaatccgttgatgacccgttaaaatgtgacccgacccttaacccgttagtcgaatcgccccgtaaaacacctttagtaaggaatacttagctgcgagcatatagcataagtaaggacatatatgttagatcaaaaaaagtactattgcatgccctgatgcgcaccatcaaatggaaa

SEQ ID NO: 2155 - DNA, 200 bp, Amaranthus palmeri
taggttaataaagggtcgggccattaacgggccttggtgtaaagggttgggcagagccgggtcaaataattataggaattggttgcaacattttttttttccactttttgtttttatattttagatattatatacaaagttaggttgacccaatgggccataaagttgaataaaaaaaactattacatgaacctttaaaa

SEQ ID NO: 2156 - DNA, 200 bp, Amaranthus palmeri
ttttaaaggttcatgtaatagttttttttattcaactttatggcccattgggtcaacctaactttgtatataatatctaaaatataaaaacaaaaagtggaaaaaaaaaatgttgcaaccaattcctataattatttgacccggctctgcccaaccctttacaccaaggcccgttaatggcccgaccctttattaaccta

SEQ ID NO: 2157 - DNA, 200 bp, Amaranthus palmeri
aaaactattacatgaacctttaaaaacgggtcaaagtgggcctggtttaaacgagctttgacccgtcctgccccgttgaaatttgacatgaccctccccgcctcgccctatttaaatttagctccatcccggcccattgaacacatctattcctaaaataactaacattatgatggctcatcctattcgctaccatgcat

SEQ ID NO: 2158 - DNA, 200 bp, Amaranthus palmeri
atgcatggtagcgaataggatgagccatcataatgttagttattttaggaatagatgtgttcaatgggccgggatggagctaaatttaaatagggcgaggcggggagggtcatgtcaaatttcaacggggcaggacgggtcaaagctcgtttaaaccaggcccactttgacccgtttttaaaggttcatgtaatagtttt

SEQ ID NO: 2159 - DNA, 200 bp, Amaranthus palmeri
gctcatcctattcgctaccatgcatgtaaatgtacacagtgtctatccgtttatccttttttatatccctgtataccatttgtgactaacggtattaattttttatcttccttgtaggttgaagatctatctagagagcctcaagtggaacgtgaacttatgctattaaagcttcattctaatgcggatacccatgctga

SEQ ID NO: 2160 - DNA, 200 bp, Amaranthus palmeri
tcagcatgggtatccgcattagaatgaagctttaatagcataagttcacgttccacttgaggctctctagatagatcttcaacctacaaggaagataaaaaattaataccgttagtcacaaatggtatacagggatataaaaaaggataaacggatagacactgtgtacatttacatgcatggtagcgaataggatgagc

SEQ ID NO: 2161 - DNA, 200 bp, Amaranthus palmeri
attctaatgcggatacccatgctgaggtagttccacaagttcaaataattatatcctgaatgctatataattcatgaatcttttgttttcctcttagaatcatcagctacaagaaggtagataaagataagcaaatattcaaaaatatgctataacatcatgtgctttgtaagctttaaacttagagataacaaaaatac

SEQ ID NO: 2162 - DNA, 200 bp, Amaranthus palmeri
gtatttttgttatctctaagtttaaagcttacaaagcacatgatgttatagcatatttttgaatatttgcttatctttatctaccttcttgtagctgatgattctaagaggaaaacaaaagattcatgaattatatagcattcaggatataattatttgaacttgtggaactacctcagcatgggtatccgcattagaat

SEQ ID NO: 2163 - DNA, 200 bp, Amaranthus palmeri
ttaaacttagagataacaaaaatacttaagaatacatcatgggtatgtagctgaagatcaaatgggaagttacattgcttctttgtgtgtattgtaaacaatctggtatcgtataagtccaaattccattttttgattttcagataatgtggttagtggacatcttcagggcaaaaattgtcgatatgtcggaaagcttc

SEQ ID NO: 2164 - DNA, 200 bp, Amaranthus palmeri
gaagctttccgacatatcgacaatttttgccctgaagatgtccactaaccacattatctgaaaatcaaaaaatggaatttggacttatacgataccagattgtttacaatacacacaaagaagcaatgtaacttcccatttgatcttcagctacatacccatgatgtattcttaagtatttttgttatctctaagtttaa

SEQ ID NO: 2165 - DNA, 200 bp, Amaranthus palmeri
aattgtcgatatgtcggaaagcttcgttactgtagaggttagtatgtttgtggttgacatcttgtgtacctatcttccgttcaatgtagattctttttcttagtgctattttattttctgtcgtgcaggtgactggcgatcctggaaagatggctgctgtcctgagaaattttagcaagtatggaatcaaagaagttgcc

SEQ ID NO: 2166 - DNA, 200 bp, Amaranthus palmeri
ggcaacttctttgattccatacttgctaaaatttctcaggacagcagccatctttccaggatcgccagtcacctgcacgacagaaaataaaatagcactaagaaaaagaatctacattgaacggaagataggtacacaagatgtcaaccacaaacatactaacctctacagtaacgaagctttccgacatatcgacaatt

SEQ ID NO: 2167 - DNA, 200 bp, Amaranthus palmeri
caagtatggaatcaaagaagttgccagaacaggaaaggtcagtcttttagacaattgcagtaaattcaccggaatactatgaatgatgcaaagattacgtgcggtaaatcgtaaacaggctgttgaatctcttcaactaaattatatctgatgcgaagtgcgtttattcaactaccttttttgtgtgaaatgatagattg

SEQ ID NO: 2168 - DNA, 200 bp, Amaranthus palmeri
caatctatcatttcacacaaaaaaggtagttgaataaacgcacttcgcatcagatataatttagttgaagagattcaacagcctgtttacgatttaccgcacgtaatctttgcatcattcatagtattccggtgaatttactgcaattgtctaaaagactgacctttcctgttctggcaacttctttgattccatacttg

SEQ ID NO: 2169 - DNA, 200 bp, Amaranthus palmeri
cttttttgtgtgaaatgatagattgctctaagacgagaaaggatgggcgagacagctcctttttggagattctctgctgcatcttatccagatctagaagaaaaggctgttgaatcttttgtcaggcctgcaaaaagaagcatcaatgctgatcctggctcatcgtctagtgtaagtgaagttttatttgatcaacattt

SEQ ID NO: 2170 - DNA, 200 bp, Amaranthus palmeri
aaatgttgatcaaataaaacttcacttacactagacgatgagccaggatcagcattgatgcttctttttgcaggcctgacaaaagattcaacagccttttcttctagatctggataagatgcagcagagaatctccaaaaaggagctgtctcgcccatcctttctcgtcttagagcaatctatcatttcacacaaaaaag

SEQ ID NO: 2171 - DNA, 200 bp, Amaranthus palmeri
gtgaagttttatttgatcaacatttatcttatccttctcttactttgtcttgcattagcgtatattctttttggtaattacaaatttagttttttttaaatgttcctagggtgatgttattattgacattgataaatattcttattggtagtatatagatatattatatttcccatagattgctctaagacaggtggcgt

SEQ ID NO: 2172 - DNA, 200 bp, Amaranthus palmeri
acgccacctgtcttagagcaatctatgggaaatataatatatctatatactaccaataagaatatttatcaatgtcaataataacatcaccctaggaacatttaaaaaaaactaaatttgtaattaccaaaaagaatatacgctaatgcaagacaaagtaagagaaggataagataaatgttgatcaaataaaacttcac

SEQ ID NO: 2173 - DNA, 200 bp, Amaranthus palmeri
tagattgctctaagacaggtggcgtatatccgcccgtccgaaaccccgccaagtctcatacgggcatacggcccgtttggtaactggcaatgataatgaatgttagtataattttggtaagaatatcttctcataaacttaatgactttacttattctccttcaacaagctcattttccttacaaaattctttataatgc

SEQ ID NO: 2174 - DNA, 200 bp, Amaranthus palmeri
gcattataaagaattttgtaaggaaaatgagcttgttgaaggagaataagtaaagtcattaagtttatgagaagatattcttaccaaaattatactaacattcattatcattgccagttaccaaacgggccgtatgcccgtatgagacttggcggggtttcggacgggcggatatacgccacctgtcttagagcaatcta

SEQ ID NO: 2175 - DNA, 200 bp, Amaranthus palmeri
ttccttacaaaattctttataatgcatcaccacttaaacctgtggtataaggtggtactgaaatattgtgaacaaaaacacttttttattattaaaatttcattaccatagtgatgacatgatacatattatgaagatttacactacaaatcattcccattaccaccatttagaaccattagcctaacgggcagttaatg

SEQ ID NO: 2176 - DNA, 200 bp, Amaranthus palmeri
cattaactgcccgttaggctaatggttctaaatggtggtaatgggaatgatttgtagtgtaaatcttcataatatgtatcatgtcatcactatggtaatgaaattttaataataaaaaagtgtttttgttcacaatatttcagtaccaccttataccacaggtttaagtggtgatgcattataaagaattttgtaaggaa

SEQ ID NO: 2177 - DNA, 200 bp, Amaranthus palmeri
ccattagcctaacgggcagttaatgcattgggataatggagtggaaaaaacgttaattgtcatttatgaactcaattttttgttttgggtttggcacttttgcatttggaatttaaaatgcgtttattcaatgaagggtgatgtttatccagtggagccttatgatgcctccataaatacagtacttgatgctcactggg

SEQ ID NO: 2178 - DNA, 200 bp, Amaranthus palmeri
cccagtgagcatcaagtactgtatttatggaggcatcataaggctccactggataaacatcacccttcattgaataaacgcattttaaattccaaatgcaaaagtgccaaacccaaaacaaaaaattgagttcataaatgacaattaacgttttttccactccattatcccaatgcattaactgcccgttaggctaatgg

SEQ ID NO: 2179 - DNA, 200 bp, Amaranthus palmeri
aatacagtacttgatgctcactggggagttctttacgaagatgatgtaagttctctttgtcactacctgaattttgttcatcttgtagcatactttcatatgatgtgatcttcagatcttttacttaatgttaccttaatttactaaatggcttcatatttttcccagaatggcctaaaattcgttagtttggctcataa

SEQ ID NO: 2180 - DNA, 200 bp, Amaranthus palmeri
ttatgagccaaactaacgaattttaggccattctgggaaaaatatgaagccatttagtaaattaaggtaacattaagtaaaagatctgaagatcacatcatatgaaagtatgctacaagatgaacaaaattcaggtagtgacaaagagaacttacatcatcttcgtaaagaactccccagtgagcatcaagtactgtatt

SEQ ID NO: 2181 - DNA, 200 bp, Amaranthus palmeri
taaaattcgttagtttggctcataattatttaagacatgtcaaactttccttaagaccggctctatcaaatctttagccttatttgggaggttctggttaatgtctttcaatgtttggcttacttgttcatcctcagaactttcatatttgtttgattttaagcaacgttattagaattgagattctacaacactacgat

SEQ ID NO: 2182 - DNA, 200 bp, Amaranthus palmeri
atcgtagtgttgtagaatctcaattctaataacgttgcttaaaatcaaacaaatatgaaagttctgaggatgaacaagtaagccaaacattgaaagacattaaccagaacctcccaaataaggctaaagatttgatagagccggtcttaaggaaagtttgacatgtcttaaataattatgagccaaactaacgaatttta

SEQ ID NO: 2183 - DNA, 200 bp, Amaranthus palmeri
aattgagattctacaacactacgattctacctacgatctagattgctcgcttgtttcggatcgtattatagtagaattgtagatcagaatcatgattttaataactatggttttaagaatggagtagtttaataaatctgttctgttagtattctgatgtactttcaacatgccagtcaagcggacttgtgtcacatact

SEQ ID NO: 2184 - DNA, 200 bp, Amaranthus palmeri
agtatgtgacacaagtccgcttgactggcatgttgaaagtacatcagaatactaacagaacagatttattaaactactccattcttaaaaccatagttattaaaatcatgattctgatctacaattctactataatacgatccgaaacaagcgagcaatctagatcgtaggtagaatcgtagtgttgtagaatctcaatt

SEQ ID NO: 2185 - DNA, 200 bp, Amaranthus palmeri
gtcaagcggacttgtgtcacatactctgtccatgctggtaaataatgctcctggagttctgaacaccgttacaggagtaattgctcgtagaggttataacattcaggtcagtacggactctgactgcaccatgaaagtatatctcgtcttttgcattatgttaagttgattgtcccttttccttcttcccagagtcttgc

SEQ ID NO: 2186 - DNA, 200 bp, Amaranthus palmeri
gcaagactctgggaagaaggaaaagggacaatcaacttaacataatgcaaaagacgagatatactttcatggtgcagtcagagtccgtactgacctgaatgttataacctctacgagcaattactcctgtaacggtgttcagaactccaggagcattatttaccagcatggacagagtatgtgacacaagtccgcttgac

SEQ ID NO: 2187 - DNA, 200 bp, Amaranthus palmeri
cttttccttcttcccagagtcttgctgtgggccctgctgaaaaggagggtctttctcgtatcacaactgttgttcctggaaacgacgagtcaattgcaaaattggttcagcaattaaacaaattagtagatcttcatgaggtgagcatctatttgcattcagcgtagacataatcgtccaaattagttagtgtcatgttt

SEQ ID NO: 2188 - DNA, 200 bp, Amaranthus palmeri
aaacatgacactaactaatttggacgattatgtctacgctgaatgcaaatagatgctcacctcatgaagatctactaatttgtttaattgctgaaccaattttgcaattgactcgtcgtttccaggaacaacagttgtgatacgagaaagaccctccttttcagcagggcccacagcaagactctgggaagaaggaaaag

SEQ ID NO: 2189 - DNA, 200 bp, Amaranthus palmeri
gtccaaattagttagtgtcatgtttacttatgtcgttgttgtcgcagattcaagaccttactcaccagccatttgcagagcgagagcttatgttaattaaagtagcggcaaatacttcggccaggagagacgtccttgatattgctaatatattccgtgcaaaacctgtggatgtttctgatcacacaataacattacaa

SEQ ID NO: 2190 - DNA, 200 bp, Amaranthus palmeri
ttgtaatgttattgtgtgatcagaaacatccacaggttttgcacggaatatattagcaatatcaaggacgtctctcctggccgaagtatttgccgctactttaattaacataagctctcgctctgcaaatggctggtgagtaaggtcttgaatctgcgacaacaacgacataagtaaacatgacactaactaatttggac

SEQ ID NO: 2191 - DNA, 200 bp, Amaranthus palmeri
ttctgatcacacaataacattacaagtaagcataaatgaatttggtagtttatttagtcttctcttgttactctcaacaatgtctattcacaaattcttgtgtgagacggtctcaccgtgatacgttccccatacatggattgaatagcccaactaatacaattatcagcatatgagcttcaattagtctcttacaagag

SEQ ID NO: 2192 - DNA, 200 bp, Amaranthus palmeri
ctcttgtaagagactaattgaagctcatatgctgataattgtattagttgggctattcaatccatgtatggggaacgtatcacggtgagaccgtctcacacaagaatttgtgaatagacattgttgagagtaacaagagaagactaaataaactaccaaattcatttatgcttacttgtaatgttattgtgtgatcagaa

SEQ ID NO: 2193 - DNA, 200 bp, Amaranthus palmeri
agcttcaattagtctcttacaagagtaaatcatgtctatatccttatttcgatggtccatttcgaattgaaacgaatataaataaaaagctaatggaatgcgagtatttcactaataacgaaaaccgtagggagctaagacagtttacggtattgaggatctctgtaatttgtctttgtttttttcagcttgccggtgat

SEQ ID NO: 2194 - DNA, 200 bp, Amaranthus palmeri
atcaccggcaagctgaaaaaaacaaagacaaattacagagatcctcaataccgtaaactgtcttagctccctacggttttcgttattagtgaaatactcgcattccattagctttttatttatattcgtttcaattcgaaatggaccatcgaaataaggatatagacatgatttactcttgtaagagactaattgaagct

SEQ ID NO: 2195 - DNA, 200 bp, Amaranthus palmeri
ttgtttttttcagcttgccggtgatttagacaaaatggttgcgctacagagattattggagccttacggcatctgtgaggtatgtttatatgcatatttatttctcccgaaaccgattagaatcatttcatgtgttcgggtcaaataggaaatatatggccatttgtagcttttcaatagactccgagaaggcgagaacc

SEQ ID NO: 2196 - DNA, 200 bp, Amaranthus palmeri
ggttctcgccttctcggagtctattgaaaagctacaaatggccatatatttcctatttgacccgaacacatgaaatgattctaatcggtttcgggagaaataaatatgcatataaacatacctcacagatgccgtaaggctccaataatctctgtagcgcaaccattttgtctaaatcaccggcaagctgaaaaaaacaa

SEQ ID NO: 2197 - DNA, 200 bp, Amaranthus palmeri
aatagactccgagaaggcgagaacccttatctccttaactactaaaacatttacagctcgttgattgtcggtaataaaaggtgatattgagaataatttgtagtgtaaatttttcatgattgtattatatcattccctgggtaatgaatagttaatcataaaaaaactttttttttcgcaatttttcattaccatttgtg

SEQ ID NO: 2198 - DNA, 200 bp, Amaranthus palmeri
cacaaatggtaatgaaaaattgcgaaaaaaaaagtttttttatgattaactattcattacccagggaatgatataatacaatcatgaaaaatttacactacaaattattctcaatatcaccttttattaccgacaatcaacgagctgtaaatgttttagtagttaaggagataagggttctcgccttctcggagtctatt

SEQ ID NO: 2199 - DNA, 200 bp, Amaranthus palmeri
tcgcaatttttcattaccatttgtgtcacctctacgaatggtaatgcatatgattgattgaatgagctttatgaaggaaataagatgattgaagtaaatcaatcaagatcgttaaacttgtaaagagattttctcaccaaacttactctaaatttcatttccatttccactattcaataccgataactaaacgggcatca

SEQ ID NO: 2200 - DNA, 200 bp, Amaranthus palmeri
tgatgcccgtttagttatcggtattgaatagtggaaatggaaatgaaatttagagtaagtttggtgagaaaatctctttacaagtttaacgatcttgattgatttacttcaatcatcttatttccttcataaagctcattcaatcaatcatatgcattaccattcgtagaggtgacacaaatggtaatgaaaaattgcga

SEQ ID NO: 2201 - DNA, 200 bp, Amaranthus palmeri
aataccgataactaaacgggcatcagcaccatttagtcgagtacttgattgcaattcaatttaattcagttcagtttagttgtaagtagttctagagatagcgaacttcaatgatcatggactgactataacattttatatctgtcttcaaggtggcacggactggaagagtagcactagctcgagagtctagggtagat

SEQ ID NO: 2202 - DNA, 200 bp, Amaranthus palmeri
atctaccctagactctcgagctagtgctactcttccagtccgtgccaccttgaagacagatataaaatgttatagtcagtccatgatcattgaagttcgctatctctagaactacttacaactaaactgaactgaattaaattgaattgcaatcaagtactcgactaaatggtgctgatgcccgtttagttatcggtatt

SEQ ID NO: 2203 - DNA, 200 bp, Amaranthus palmeri
actagctcgagagtctagggtagattccaagtatttacgaggatacactcttccgttgtatgaatgaaaaactccggctatgtctttccgacattaccttgtccgattccttccgctcttctacactgcactacgggcagaacaattgcccacgagtagagtaaactaaaaggagaagcaacaataccgatctttgcttt

SEQ ID NO: 2204 - DNA, 200 bp, Amaranthus palmeri
aaagcaaagatcggtattgttgcttctccttttagtttactctactcgtgggcaattgttctgcccgtagtgcagtgtagaagagcggaaggaatcggacaaggtaatgtcggaaagacatagccggagtttttcattcatacaacggaagagtgtatcctcgtaaatacttggaatctaccctagactctcgagctagt

SEQ ID NO: 2205 - DNA, 200 bp, Amaranthus palmeri
aagcaacaataccgatctttgctttgaagattgtataacaatagagtttgtatttgactagtatttacattctttttattaaattgtatgatttgctcaacgttgtaattacatatcaccttgaggtttttgatttagcattgtaccctggctaagataacatagtcatttcaggacatacgagtgttcccagaacacaa

SEQ ID NO: 2206 - DNA, 200 bp, Amaranthus palmeri
ttgtgttctgggaacactcgtatgtcctgaaatgactatgttatcttagccagggtacaatgctaaatcaaaaacctcaaggtgatatgtaattacaacgttgagcaaatcatacaatttaataaaaagaatgtaaatactagtcaaatacaaactctattgttatacaatcttcaaagcaaagatcggtattgttgctt

SEQ ID NO: 2207 - DNA, 200 bp, Amaranthus palmeri
acatacgagtgttcccagaacacaaggaaaaaaaaaagaacacaagaatattgaaaatttgaaacaaataactaatttaaaaaaaaaaaagcttctggtaaacttaatttcaaaataaagaatttccatgtccaagcctaaggtcatgtatgttcaaattcaactttcaagtaagaccttatcaaaaattatcaatacaa

SEQ ID NO: 2208 - DNA, 200 bp, Amaranthus palmeri
ttgtattgataatttttgataaggtcttacttgaaagttgaatttgaacatacatgaccttaggcttggacatggaaattctttattttgaaattaagtttaccagaagcttttttttttttaaattagttatttgtttcaaattttcaatattcttgtgttcttttttttttccttgtgttctgggaacactcgtatgt

SEQ ID NO: 2209 - DNA, 200 bp, Amaranthus palmeri
accttatcaaaaattatcaatacaagtttatcaatattttatattattagtgttattaggtcaattggctccatttttacgggcttggttaaaggactcaatagttcagtcaacaccttaggaaagcccaccttagggctgaaattacaaaaatgccttttgaatagtcatacaggtcattaattgctttataagtaccc

SEQ ID NO: 2210 - DNA, 200 bp, Amaranthus palmeri
gggtacttataaagcaattaatgacctgtatgactattcaaaaggcatttttgtaatttcagccctaaggtgggctttcctaaggtgttgactgaactattgagtcctttaaccaagcccgtaaaaatggagccaattgacctaataacactaataatataaaatattgataaacttgtattgataatttttgataaggt

SEQ ID NO: 2211 - DNA, 200 bp, Amaranthus palmeri
gtcattaattgctttataagtacccccattaattgtcgtttatggtatgctttctctctctatattactcacttgcattcaattcctatttcattgtaacgatcactgacttgagcgtcggaggggctttcggagagaccacccccggacaagtaactctgttcgttttgctggtcatcagtcgaactcgattttagtat

SEQ ID NO: 2212 - DNA, 200 bp, Amaranthus palmeri
atactaaaatcgagttcgactgatgaccagcaaaacgaacagagttacttgtccgggggtggtctctccgaaagcccctccgacgctcaagtcagtgatcgttacaatgaaataggaattgaatgcaagtgagtaatatagagagagaaagcataccataaacgacaattaatgggggtacttataaagcaattaatgac

SEQ ID NO: 2213 - DNA, 200 bp, Amaranthus palmeri
catcagtcgaactcgattttagtattcggaccctccaacagcaggatccacattcacaaacaaccccttccaatgaggaataatttgactcgatttctacgcaaaaacaattagcatggaaaatatttatatatactaaaatattatacattgtaaaataaatcatttaaattatacaacaatgtgggtacaaattaaaa

SEQ ID NO: 2214 - DNA, 200 bp, Amaranthus palmeri
ttttaatttgtacccacattgttgtataatttaaatgatttattttacaatgtataatattttagtatatataaatattttccatgctaattgtttttgcgtagaaatcgagtcaaattattcctcattggaaggggttgtttgtgaatgtggatcctgctgttggagggtccgaatactaaaatcgagttcgactgatg

SEQ ID NO: 2215 - DNA, 200 bp, Amaranthus palmeri
acaacaatgtgggtacaaattaaaatgtaatttcatttcaagcaattggtaggttgaatgaagcctaaaacattcccatgagcattttgacaatatgattgagcttttccatcaatgtatttgagatcaatattttggagttgaattcctttgcatggatttgtggaactacaattaaatgtcattgctacctcgctttg

SEQ ID NO: 2216 - DNA, 200 bp, Amaranthus palmeri
caaagcgaggtagcaatgacatttaattgtagttccacaaatccatgcaaaggaattcaactccaaaatattgatctcaaatacattgatggaaaagctcaatcatattgtcaaaatgctcatgggaatgttttaggcttcattcaacctaccaattgcttgaaatgaaattacattttaatttgtacccacattgttgt

SEQ ID NO: 2217 - DNA, 200 bp, Amaranthus palmeri
taaatgtcattgctacctcgctttgtgaacttcctcttatattttggtacttcacatcctcgatttctatacccgattcctaataaacaaaattaattatatcatttatatctctgattgtgcataattaaaaattacaaaaaaattaatattagggatctttgcattgaaacgaatcaaacaagctaagatcccacttg

SEQ ID NO: 2218 - DNA, 200 bp, Amaranthus palmeri
caagtgggatcttagcttgtttgattcgtttcaatgcaaagatccctaatattaatttttttgtaatttttaattatgcacaatcagagatataaatgatataattaattttgtttattaggaatcgggtatagaaatcgaggatgtgaagtaccaaaatataagaggaagttcacaaagcgaggtagcaatgacattta

SEQ ID NO: 2219 - DNA, 200 bp, Amaranthus palmeri
atcaaacaagctaagatcccacttgattacatattgtcaaggaaccaactcaaccaaaagcttaagctgattgttgaggccttaggatatagtatatactctaacacgccccctcacacgagagccctttgggcttgaagtgtggacgcgacatagaacctcctaattcctggcgttgaatattccactttaaatgaggg

SEQ ID NO: 2220 - DNA, 200 bp, Amaranthus palmeri
ccctcatttaaagtggaatattcaacgccaggaattaggaggttctatgtcgcgtccacacttcaagcccaaagggctctcgtgtgagggggcgtgttagagtatatactatatcctaaggcctcaacaatcagcttaagcttttggttgagttggttccttgacaatatgtaatcaagtgggatcttagcttgtttgat

SEQ ID NO: 2221 - DNA, 200 bp, Amaranthus palmeri
ttgaatattccactttaaatgaggggtgattgagattcgaacctgtgacatcttgtttcactggctttgataccatgtcaagagaccaactcaactaaaagcttaagctgatggttgaggcctcaggatatgttatatactctaacacatattgtttatagattaagaatagtgtttggcaaattagcttattgagccat

SEQ ID NO: 2222 - DNA, 200 bp, Amaranthus palmeri
atggctcaataagctaatttgccaaacactattcttaatctataaacaatatgtgttagagtatataacatatcctgaggcctcaaccatcagcttaagcttttagttgagttggtctcttgacatggtatcaaagccagtgaaacaagatgtcacaggttcgaatctcaatcacccctcatttaaagtggaatattcaa

SEQ ID NO: 2223 - DNA, 200 bp, Amaranthus palmeri
ttggcaaattagcttattgagccattttagcttattttgattcaaatagagggttgagtggcaaaccagctaatgctagtgtttggtgaattagcttgttgagtcagcttattgatatgaataagctgtttttgaacaatctgctcatagcaacgggttcaaaaacagctggtcaaaccagttaatataatcagttagtt

SEQ ID NO: 2224 - DNA, 200 bp, Amaranthus palmeri
aactaactgattatattaactggtttgaccagctgtttttgaacccgttgctatgagcagattgttcaaaaacagcttattcatatcaataagctgactcaacaagctaattcaccaaacactagcattagctggtttgccactcaaccctctatttgaatcaaaataagctaaaatggctcaataagctaatttgccaa

SEQ ID NO: 2225 - DNA, 200 bp, Amaranthus palmeri
caaacaaaaggtataaatttaattaatatacttaattcaaaaaaaaaaaattaattaatatactagtaagtgtgtttcgcatttcaatatttgaataatattatctttttggaatgataatatttaaaagcaacaaacaaaagttataaatttaattaaaaattacaactaagtgtgttttgcatttcaatatttgaata

SEQ ID NO: 2226 - DNA, 200 bp, Amaranthus palmeri
tattcaaatattgaaatgcaaaacacacttagttgtaatttttaattaaatttataacttttgtttgttgcttttaaatattatcattccaaaaagataatattattcaaatattgaaatgcgaaacacacttactagtatattaattaattttttttttttgaattaagtatattaattaaatttataccttttgtttg

SEQ ID NO: 2227 - DNA, 200 bp, Amaranthus palmeri
tgttttgcatttcaatatttgaataaaaaattataagtgagttgtctatttataataaaataaataatgcactactcatataatcatattcatcctcactactcatattcttcttcaaaaaaaatcctcactaccatctccattctccccatttcatttctttctcatatctctctaatggcggccatttcctttaacat

SEQ ID NO: 2228 - DNA, 200 bp, Amaranthus palmeri
atgttaaaggaaatggccgccattagagagatatgagaaagaaatgaaatggggagaatggagatggtagtgaggattttttttgaagaagaatatgagtagtgaggatgaatatgattatatgagtagtgcattatttattttattataaatagacaactcacttataattttttattcaaatattgaaatgcaaaaca

SEQ ID NO: 2229 - DNA, 200 bp, Amaranthus palmeri
taatggcggccatttcctttaacatcaatggcggaaagatcggaactttatgtccaaatcctaaatatggttgtgggtttttgagaaaatgggattttggagctcatacaactgtatctactaaacccatgtcaagaattttaagcttgaaagcagttgaagtttctgttgatgctacagtaaatgcagtttctgtttca

SEQ ID NO: 2230 - DNA, 200 bp, Amaranthus palmeri
tgaaacagaaactgcatttactgtagcatcaacagaaacttcaactgctttcaagcttaaaattcttgacatgggtttagtagatacagttgtatgagctccaaaatcccattttctcaaaaacccacaaccatatttaggatttggacataaagttccgatctttccgccattgatgttaaaggaaatggccgccatta

SEQ ID NO: 2231 - DNA, 200 bp, Amaranthus palmeri
tacagtaaatgcagtttctgtttcagctaattctaggtaatgtacttaattaatattaccattttttcattgaatctaaactttttttcttcatgtggaattgtggatataggagtatttatggaaagaaatataagggtttttgcttctttattggtttttgttaaaaaaattgtatggttgcatacttttgtgatcat

SEQ ID NO: 2232 - DNA, 200 bp, Amaranthus palmeri
atgatcacaaaagtatgcaaccatacaatttttttaacaaaaaccaataaagaagcaaaaacccttatatttctttccataaatactcctatatccacaattccacatgaagaaaaaaagtttagattcaatgaaaaaatggtaatattaattaagtacattacctagaattagctgaaacagaaactgcatttactgta

SEQ ID NO: 2233 - DNA, 200 bp, Amaranthus palmeri
tatggttgcatacttttgtgatcattcatgttcaacacgttcgattgtacaaactctaaaaaattgaatgcaaaagatacaaaattgttcgaaaatatcataatttttgaaatttcacagggtcttttaaagaatttttcaaattttgctccggtcctgattctcctaagctcaccctataaggacttaaggagtcacca

SEQ ID NO: 2234 - DNA, 200 bp, Amaranthus palmeri
tggtgactccttaagtccttatagggtgagcttaggagaatcaggaccggagcaaaatttgaaaaattctttaaaagaccctgtgaaatttcaaaaattatgatattttcgaacaattttgtatcttttgcattcaattttttagagtttgtacaatcgaacgtgttgaacatgaatgatcacaaaagtatgcaaccata

SEQ ID NO: 2235 - DNA, 200 bp, Amaranthus palmeri
cctataaggacttaaggagtcaccaaaaagtaaagttgagtatactagtcatgtgactctaattttagcctaggtggaagaaatagggtcaaggtcaatggaatgttgtttgtttgtttgttctggtatcattacaatttacagatatgaagttgcaataaggttttggattatattgtaccatattaaattggcttatt

SEQ ID NO: 2236 - DNA, 200 bp, Amaranthus palmeri
aataagccaatttaatatggtacaatataatccaaaaccttattgcaacttcatatctgtaaattgtaatgataccagaacaaacaaacaaacaacattccattgaccttgaccctatttcttccacctaggctaaaattagagtcacatgactagtatactcaactttactttttggtgactccttaagtccttatagg

SEQ ID NO: 2237 - DNA, 200 bp, Amaranthus palmeri
ttgtaccatattaaattggcttattagactatgtgtacttttatttatatgaaattgagatgatgtttgctgccaaacgtcaatcgaaaacaactatatattatcattaacaagggtaaatgtgaggtattgatccccaaacccccacaaatggaagttatttgatggcattgaggtgatataacattgtatgaagttgc

SEQ ID NO: 2238 - DNA, 200 bp, Amaranthus palmeri
gcaacttcatacaatgttatatcacctcaatgccatcaaataacttccatttgtgggggtttggggatcaatacctcacatttacccttgttaatgataatatatagttgttttcgattgacgtttggcagcaaacatcatctcaatttcatataaataaaagtacacatagtctaataagccaatttaatatggtacaa

SEQ ID NO: 2239 - DNA, 200 bp, Amaranthus palmeri
gtgatataacattgtatgaagttgcaaattatgaagctaaatcctgtattaagtgggagatagagcatcttttggttgtaatgttataactttagttggattttgtaagttttgttgcaagttattcatgaattaaggagatgtgtctttctatgtgaatcacatatgtaagaagtagtttatatgtttgttgatcttta

SEQ ID NO: 2240 - DNA, 200 bp, Amaranthus palmeri
taaagatcaacaaacatataaactacttcttacatatgtgattcacatagaaagacacatctccttaattcatgaataacttgcaacaaaacttacaaaatccaactaaagttataacattacaaccaaaagatgctctatctcccacttaatacaggatttagcttcataatttgcaacttcatacaatgttatatcac

SEQ ID NO: 2241 - DNA, 200 bp, Amaranthus palmeri
tagtttatatgtttgttgatctttatactgtatgatggccgattcaaatgtggaagttgatatgatccttttaaggtctactgagaagttgttcttcaattcattatattatccttggttttcgaccataggaggtcacatgttcgaatctagcctcatatataacatatcttgaggcttcaaccatcaacttaaacttt

SEQ ID NO: 2242 - DNA, 200 bp, Amaranthus palmeri
aaagtttaagttgatggttgaagcctcaagatatgttatatatgaggctagattcgaacatgtgacctcctatggtcgaaaaccaaggataatataatgaattgaagaacaacttctcagtagaccttaaaaggatcatatcaacttccacatttgaatcggccatcatacagtataaagatcaacaaacatataaacta

SEQ ID NO: 2243 - DNA, 200 bp, Amaranthus palmeri; identical to SEQ ID NO: 2075

SEQ ID NO: 2244 - DNA, 200 bp, Amaranthus palmeri; identical to SEQ ID NO: 2076

SEQ ID NO: 2245 - DNA, 200 bp, Amaranthus palmeri; identical to SEQ ID NO: 2077

SEQ ID NO: 2246 - DNA, 200 bp, Amaranthus palmeri; identical to SEQ ID NO: 2078

SEQ ID NO: 2247 - DNA, 200 bp, Amaranthus palmeri; identical to SEQ ID NO: 2079

SEQ ID NO: 2248 - DNA, 200 bp, Amaranthus palmeri; identical to SEQ ID NO: 2080

SEQ ID NO: 2249 - DNA, 200 bp, Amaranthus palmeri; identical to SEQ ID NO: 2081

SEQ ID NO: 2250 - DNA, 200 bp, Amaranthus palmeri; identical to SEQ ID NO: 2082

SEQ ID NO: 2251 - DNA, 200 bp, Amaranthus palmeri
aacataaatcttcgaataatgagactatgacatagtgcttggttcaccactttacggattgcgttcgataaaattactttacgaggtcttataatttataaatctgttttccaaaatagcttatacaaactaaacatatcctgaatttgttttttactaaaataaaaaaaaattcttttaatatggagcgttacgtatca

SEQ ID NO: 2252 - DNA, 200 bp, Amaranthus palmeri
tgatacgtaacgctccatattaaaagaatttttttttattttagtaaaaaacaaattcaggatatgtttagtttgtataagctattttggaaaacagatttataaattataagacctcgtaaagtaattttatcgaacgcaatccgtaaagtggtgaaccaagcactatgtcatagtctcattattcgaagatttatgtt

SEQ ID NO: 2253 - DNA, 200 bp, Amaranthus palmeri
ttttaatatggagcgttacgtatcaatcaatataatggatcatcttatatgcatatgtttgtacaatgtacattttttgttagattgtctatttgtcctgataacaaccttggatgattcttgtatttcttgtaggttgaagatctatcgagagagccacaagtggaacgtgaactgatgcttgtaaagcttaattctga

SEQ ID NO: 2254 - DNA, 200 bp, Amaranthus palmeri
tcagaattaagctttacaagcatcagttcacgttccacttgtggctctctcgatagatcttcaacctacaagaaatacaagaatcatccaaggttgttatcaggacaaatagacaatctaacaaaaaatgtacattgtacaaacatatgcatataagatgatccattatattgattgatacgtaacgctccatattaaaa

SEQ ID NO: 2255 - DNA, 200 bp, Amaranthus palmeri
tgatgcttgtaaagcttaattctgatgcaaattcccacgcagaggtagttccaaaaattcaatgataatttatgaatggtatattttccactttttaagttctaatttcctcggctgttgtcagttagagtctagcaaggaaaaagatagagatgttttgctttagattttatcgatgatcgagaaagatgctatacttc

SEQ ID NO: 2256 - DNA, 200 bp, Amaranthus palmeri
gaagtatagcatctttctcgatcatcgataaaatctaaagcaaaacatctctatctttttccttgctagactctaactgacaacagccgaggaaattagaacttaaaaagtggaaaatataccattcataaattatcattgaatttttggaactacctctgcgtgggaatttgcatcagaattaagctttacaagcatca

SEQ ID NO: 2257 - DNA, 200 bp, Amaranthus palmeri
atgatcgagaaagatgctatacttcatataaggccatgactgttacaacaacaacgccagagctttagtcccaaaagttcatggctgttagatagtttaaatttaactagaagtacatcgtgttgtgtgaagctcgtataagaaattgcattagtgtctttgtgagaaatctaataccgattaacgtaaatttttaattt

SEQ ID NO: 2258 - DNA, 200 bp, Amaranthus palmeri
aaattaaaaatttacgttaatcggtattagatttctcacaaagacactaatgcaatttcttatacgagcttcacacaacacgatgtacttctagttaaatttaaactatctaacagccatgaacttttgggactaaagctctggcgttgttgttgtaacagtcatggccttatatgaagtatagcatctttctcgatcat

SEQ ID NO: 2259 - DNA, 200 bp, Amaranthus palmeri
accgattaacgtaaatttttaatttttgatcttcagctaatgtggctagtggacatcttcagggcaaaaattgtggatatctcagaaagcttggtcactgttgaggttagtggtatatttgtttgacttctcgcgtatctcttctatgtttgctgaattaagtccgatttttttggatttgcttccatgataaatgcaag

SEQ ID NO: 2260 - DNA, 200 bp, Amaranthus palmeri
cttgcatttatcatggaagcaaatccaaaaaaatcggacttaattcagcaaacatagaagagatacgcgagaagtcaaacaaatataccactaacctcaacagtgaccaagctttctgagatatccacaatttttgccctgaagatgtccactagccacattagctgaagatcaaaaattaaaaatttacgttaatcggt

SEQ ID NO: 2261 - DNA, 200 bp, Amaranthus palmeri
gatttgcttccatgataaatgcaagaaatttacctacaagaagttgaccattttcctccggtcgatgtaaaatctttttccttattggcattttctttggtgctgtgcaggtgaccggagatcctggaaagttggctgctgtcctaagaaattttagaaagtttggaatcaaagaaattgcaaggaccggaaaggttagt

SEQ ID NO: 2262 - DNA, 200 bp, Amaranthus palmeri
actaacctttccggtccttgcaatttctttgattccaaactttctaaaatttcttaggacagcagccaactttccaggatctccggtcacctgcacagcaccaaagaaaatgccaataaggaaaaagattttacatcgaccggaggaaaatggtcaacttcttgtaggtaaatttcttgcatttatcatggaagcaaatc

SEQ ID NO: 2263 - DNA, 200 bp, Amaranthus palmeri
aattgcaaggaccggaaaggttagtcttttagacatttgcagtaaattcagcatagaattcggaaagccgcaaagagcacatgtcaactattgtggctagccagccaagtgccaactattgtgcatttctggtgtgatcaatgtgaaacaagtttagctaactacttgttttgttttatacttaatatgatagattgctc

SEQ ID NO: 2264 - DNA, 200 bp, Amaranthus palmeri
gagcaatctatcatattaagtataaaacaaaacaagtagttagctaaacttgtttcacattgatcacaccagaaatgcacaatagttggcacttggctggctagccacaatagttgacatgtgctctttgcggctttccgaattctatgctgaatttactgcaaatgtctaaaagactaacctttccggtccttgcaatt

SEQ ID NO: 2265 - DNA, 200 bp, Amaranthus palmeri
ttatacttaatatgatagattgctctaaggcgagaaaagatgggtcagacggctcctttttggagattctctgctgcttcttatccagatctacaagaaaaggctgttgatgctctggccaagcctacgaaacggagtatcaatggtgattctggctcatcttcaagtgtaagtgatattttatcttctcgacaattatc

SEQ ID NO: 2266 - DNA, 200 bp, Amaranthus palmeri
gataattgtcgagaagataaaatatcacttacacttgaagatgagccagaatcaccattgatactccgtttcgtaggcttggccagagcatcaacagccttttcttgtagatctggataagaagcagcagagaatctccaaaaaggagccgtctgacccatcttttctcgccttagagcaatctatcatattaagtataa

SEQ ID NO: 2267 - DNA, 200 bp, Amaranthus palmeri
atattttatcttctcgacaattatctttttccttttcttaccttgcattgcctatgtatacttcgttcaccttgtattgcctatagacttaaacatgcttttatttttgaagggtgatgtttatccggtggaaccttatgatggttcgatggttaatcaagtgcttgatgctcactggggcgtactttatgacggtgatg

SEQ ID NO: 2268 - DNA, 200 bp, Amaranthus palmeri
catcaccgtcataaagtacgccccagtgagcatcaagcacttgattaaccatcgaaccatcataaggttccaccggataaacatcacccttcaaaaataaaagcatgtttaagtctataggcaatacaaggtgaacgaagtatacataggcaatgcaaggtaagaaaaggaaaaagataattgtcgagaagataaaatat

SEQ ID NO: 2269 - DNA, 200 bp, Amaranthus palmeri
tggggcgtactttatgacggtgatgtaagtgctctatcactacctgaattttttgtcactaggttgtccaacggtccatgtgatgtcatgttcaaatcgcttagcctagtgttttctaatatagctccaaattaattgtctggattcacgattcacccaaaatggcctaaattttttcgttttaatttacaattgtccaa

SEQ ID NO: 2270 - DNA, 200 bp, Amaranthus palmeri
ttggacaattgtaaattaaaacgaaaaaatttaggccattttgggtgaatcgtgaatccagacaattaatttggagctatattagaaaacactaggctaagcgatttgaacatgacatcacatggaccgttggacaacctagtgacaaaaaattcaggtagtgatagagcacttacatcaccgtcataaagtacgcccca

SEQ ID NO: 2271 - DNA, 200 bp, Amaranthus palmeri
ttcgttttaatttacaattgtccaagtcatgtcaaacatgtattaaggtctacactctgctctatgttacttggactcgggtactgagtcggcaacgtgtccaagtgtcgtacgcgtctaaatattcaattttacgcttaaaatgaagtgtctaaatgtcataccaatgtccgggcatcaaggatcggacataggtacgt

SEQ ID NO: 2272 - DNA, 200 bp, Amaranthus palmeri
acgtacctatgtccgatccttgatgcccggacattggtatgacatttagacacttcattttaagcgtaaaattgaatatttagacgcgtacgacacttggacacgttgccgactcagtacccgagtccaagtaacatagagcagagtgtagaccttaatacatgtttgacatgacttggacaattgtaaattaaaacgaa

SEQ ID NO: 2273 - DNA, 200 bp, Amaranthus palmeri
catcaaggatcggacataggtacgtgaagcaaaatgaagagtctgagtaatagcgtttcagcctcatttgaactttggagggttaaagtttatgtttttgggttttcagatgttcatctttctgttattcatgtttaattttaagaatgaaaggtagttcgacttttcagttttttgagctgcacagtactataaattgg

SEQ ID NO: 2274 - DNA, 200 bp, Amaranthus palmeri
ccaatttatagtactgtgcagctcaaaaaactgaaaagtcgaactacctttcattcttaaaattaaacatgaataacagaaagatgaacatctgaaaacccaaaaacataaactttaaccctccaaagttcaaatgaggctgaaacgctattactcagactcttcattttgcttcacgtacctatgtccgatccttgatg

SEQ ID NO: 2275 - DNA, 200 bp, Amaranthus palmeri
tgagctgcacagtactataaattggttttagtttgctctgctagtatcatgaattgcttcgttcttcatgccagtcaagtggtctccggtcacatacgctgtccatgctggtaaataatgttcccggagttcttaacactgttacaggagtaatttctcgtaggggttataacattcaggtcagtgtggactctgactac

SEQ ID NO: 2276 - DNA, 200 bp, Amaranthus palmeri
gtagtcagagtccacactgacctgaatgttataacccctacgagaaattactcctgtaacagtgttaagaactccgggaacattatttaccagcatggacagcgtatgtgaccggagaccacttgactggcatgaagaacgaagcaattcatgatactagcagagcaaactaaaaccaatttatagtactgtgcagctca

SEQ ID NO: 2277 - DNA, 200 bp, Amaranthus palmeri
tcaggtcagtgtggactctgactacagcaagaaagtatataaagccgtttgtgttatgtaatgacaatcgttcccttttcatcctcttcagagtcttgctgtaggccctgctgaaaaggagggtctttctcgtatcacaactgtcattcctggaaacgacgagtcgattggaaaattggttcagcaatttaacaagttaa

SEQ ID NO: 2278 - DNA, 200 bp, Amaranthus palmeri
ttaacttgttaaattgctgaaccaattttccaatcgactcgtcgtttccaggaatgacagttgtgatacgagaaagaccctccttttcagcagggcctacagcaagactctgaagaggatgaaaagggaacgattgtcattacataacacaaacggctttatatactttcttgctgtagtcagagtccacactgacctga

SEQ ID NO: 2279 - DNA, 200 bp, Amaranthus palmeri
ttggttcagcaatttaacaagttaatagaccttcatgaggtgagcaactatttatgtacaaaaccgaatagttgtaataagtggtatagactacatagtaataactttatggttgtaagatgcaaagtacccttatcagttatcactataatatgttctaagaagctcaaaactgaagtggaagagaaaattgtgacatt

SEQ ID NO: 2280 - DNA, 200 bp, Amaranthus palmeri
aatgtcacaattttctcttccacttcagttttgagcttcttagaacatattatagtgataactgataagggtactttgcatcttacaaccataaagttattactatgtagtctataccacttattacaactattcggttttgtacataaatagttgctcacctcatgaaggtctattaacttgttaaattgctgaaccaa

SEQ ID NO: 2281 - DNA, 200 bp, Amaranthus palmeri
aagtggaagagaaaattgtgacattggttagctccgcgtttatgacaaacttcttgattgattcttgtttttttgaatgctcagttcaatctcctttgtaatatgttgatgctcgttaagttacctattttctttgtaatacgtaaaccgtgaagttgtgttatcttagtccaacgtcacatcgtgctgctcgagtcatt

SEQ ID NO: 2282 - DNA, 200 bp, Amaranthus palmeri
aatgactcgagcagcacgatgtgacgttggactaagataacacaacttcacggtttacgtattacaaagaaaataggtaacttaacgagcatcaacatattacaaaggagattgaactgagcattcaaaaaaacaagaatcaatcaagaagtttgtcataaacgcggagctaaccaatgtcacaattttctcttccactt

SEQ ID NO: 2283 - DNA, 200 bp, Amaranthus palmeri
gtcacatcgtgctgctcgagtcatttgatttaaaacgctatttatattgaatagtgtaacatataacacagaaaaatagtagtcgggttggttcaacacacacaataatttcccacattctcccttgaatgaaagatacgagaatctaacatcagaatggttgctgctgcagattcaggaccttactcaccagccatttt

SEQ ID NO: 2284 - DNA, 200 bp, Amaranthus palmeri
aaaatggctggtgagtaaggtcctgaatctgcagcagcaaccattctgatgttagattctcgtatctttcattcaagggagaatgtgggaaattattgtgtgtgttgaaccaacccgactactatttttctgtgttatatgttacactattcaatataaatagcgttttaaatcaaatgactcgagcagcacgatgtgac

SEQ ID NO: 2285 - DNA, 200 bp, Amaranthus palmeri
caggaccttactcaccagccattttcagagcgagagcttatgttgatcaaaatagctgcaaatactacagccaggagagatgtccttgatattgctaatattttccgtgcaaaagctgtggatgtttcggatcacacgataacattacaggtactaagctgtaggcacacagtttttgccatgttccttgttttttccta

SEQ ID NO: 2286 - DNA, 200 bp, Amaranthus palmeri
taggaaaaaacaaggaacatggcaaaaactgtgtgcctacagcttagtacctgtaatgttatcgtgtgatccgaaacatccacagcttttgcacggaaaatattagcaatatcaaggacatctctcctggctgtagtatttgcagctattttgatcaacataagctctcgctctgaaaatggctggtgagtaaggtcctg

SEQ ID NO: 2287 - DNA, 200 bp, Amaranthus palmeri
ttgccatgttccttgttttttcctaatatttctgacttggtcttttccagctcgccaatatgttgggattcaggctttggcattatttattattttattttttttgcattttttccaacttccttatattgggattaaggcgttggcgttgttgcattgttgactgttgtgtcttttccagcttacgggtgatttacaca

SEQ ID NO: 2288 - DNA, 200 bp, Amaranthus palmeri
tgtgtaaatcacccgtaagctggaaaagacacaacagtcaacaatgcaacaacgccaacgccttaatcccaatataaggaagttggaaaaaatgcaaaaaaaataaaataataaataatgccaaagcctgaatcccaacatattggcgagctggaaaagaccaagtcagaaatattaggaaaaaacaaggaacatggcaa

SEQ ID NO: 2289 - DNA, 200 bp, Amaranthus palmeri
ttccagcttacgggtgatttacacaaaatggttgcgctacagagactattggagccttatggcatttgtgaggtatgcgcctatgtattattgatttttctatataatcagattttatttatttatttttggttcgaaatatgctgattgttagttattttgcttttgaatgtgaaaggattctcttgtctgtagattaa

SEQ ID NO: 2290 - DNA, 200 bp, Amaranthus palmeri
ttaatctacagacaagagaatcctttcacattcaaaagcaaaataactaacaatcagcatatttcgaaccaaaaataaataaataaaatctgattatatagaaaaatcaataatacataggcgcatacctcacaaatgccataaggctccaatagtctctgtagcgcaaccattttgtgtaaatcacccgtaagctggaa

SEQ ID NO: 2291 - DNA, 200 bp, Amaranthus palmeri
aaggattctcttgtctgtagattaagaacaatcctgccaaaaatacctattgggcttaccttaactaattacatctgtcttgaaggtggcacggacaggaagagtagcactgagtagagagtctggggtcgattctacatctttacgtggatacgctcttccattgtacgaataaaaaatctccggctatgtctttccgt

SEQ ID NO: 2292 - DNA, 200 bp, Amaranthus palmeri
acggaaagacatagccggagattttttattcgtacaatggaagagcgtatccacgtaaagatgtagaatcgaccccagactctctactcagtgctactcttcctgtccgtgccaccttcaagacagatgtaattagttaaggtaagcccaataggtatttttggcaggattgttcttaatctacagacaagagaatcctt

SEQ ID NO: 2293 - DNA, 200 bp, Amaranthus palmeri
aaaatctccggctatgtctttccgtcattatcatgtccaatttccttcagcacgtctgcactacatttacatagcgaccaattgcccgtcaaccagagtgaaggaaagcagtaattctgatctttgcttagaacatgctattttgtataataggaataattttgtattggttgtatttgctcaacaccctgtagtaacat

SEQ ID NO: 2294 - DNA, 200 bp, Amaranthus palmeri
atgttactacagggtgttgagcaaatacaaccaatacaaaattattcctattatacaaaatagcatgttctaagcaaagatcagaattactgctttccttcactctggttgacgggcaattggtcgctatgtaaatgtagtgcagacgtgctgaaggaaattggacatgataatgacggaaagacatagccggagatttt

SEQ ID NO: 2295 - DNA, 200 bp, Amaranthus palmeri
tttgctcaacaccctgtagtaacattattacctcgagttcgaatatatgaaacatagtttttctcttaaatgcgttgagaacattagtacggccccttggccggctgacacgaattaatcgagaaggaattaggactgtaaacaattccaaatactagtgttttctcgtactgggaaaacaaaagcttttactcgacttc

SEQ ID NO: 2296 - DNA, 200 bp, Amaranthus palmeri
gaagtcgagtaaaagcttttgttttcccagtacgagaaaacactagtatttggaattgtttacagtcctaattccttctcgattaattcgtgtcagccggccaaggggccgtactaatgttctcaacgcatttaagagaaaaactatgtttcatatattcgaactcgaggtaataatgttactacagggtgttgagcaaa

SEQ ID NO: 2297 - DNA, 200 bp, Amaranthus palmeri
aaaacaaaagcttttactcgacttcttagctttcgtagtagcattttgcaataatttccgaaatcataacttcaacaaactcgccatcacaattcacaccgagcaatgtttgatgcatcgatcttataatcaaacgaggatatacaatggggcataggataaacacaggaaactataattttattacgaaaaattctact

SEQ ID NO: 2298 - DNA, 200 bp, Amaranthus palmeri
agtagaatttttcgtaataaaattatagtttcctgtgtttatcctatgccccattgtatatcctcgtttgattataagatcgatgcatcaaacattgctcggtgtgaattgtgatggcgagtttgttgaagttatgatttcggaaattattgcaaaatgctactacgaaagctaagaagtcgagtaaaagcttttgtttt

SEQ ID NO: 2299 - DNA, 200 bp, Amaranthus palmeri
taattttattacgaaaaattctactataagcctttataacgatcaattacacattaaacctactatagaggatgatctataagtttgtatatcacacagaatctaacagctcattcaccaatttctcattcccgagcgacaatgagctcagaaggaaaaccagcatccgaggaatctgtaggaaccagtatatcatcatc

SEQ ID NO: 2300 - DNA, 200 bp, Amaranthus palmeri
gatgatgatatactggttcctacagattcctcggatgctggttttccttctgagctcattgtcgctcgggaatgagaaattggtgaatgagctgttagattctgtgtgatatacaaacttatagatcatcctctatagtaggtttaatgtgtaattgatcgttataaaggcttatagtagaatttttcgtaataaaatta

SEQ ID NO: 2301 - DNA, 200 bp, Amaranthus palmeri
ctgtaggaaccagtatatcatcatcggctgtgaagtcgtagttttgaccgatggctctcaatagttgatacacttcgaacattgttggcctttccttgtcgtttaagttaacacagttacaagcaactttaaggaactgtgttagttcgttatcgacactcttgtcacggagagacttatcgatggcagaacggcgatcg

SEQ ID NO: 2302 - DNA, 200 bp, Amaranthus palmeri
cgatcgccgttctgccatcgataagtctctccgtgacaagagtgtcgataacgaactaacacagttccttaaagttgcttgtaactgtgttaacttaaacgacaaggaaaggccaacaatgttcgaagtgtatcaactattgagagccatcggtcaaaactacgacttcacagccgatgatgatatactggttcctacag

SEQ ID NO: 2303 - DNA, 200 bp, Amaranthus palmeri
cttatcgatggcagaacggcgatcgtttttttctgatagtagatgtatccattctaccaaattacccttgaaggtttcgggggcattcgacacgtgagttggtttttcacccgtgactagttccaaaagaacagtgccgaaactatagacatctccctttggagttgctacaagttttctcgggtattcgggagctacat

SEQ ID NO: 2304 - DNA, 200 bp, Amaranthus palmeri
atgtagctcccgaatacccgagaaaacttgtagcaactccaaagggagatgtctatagtttcggcactgttcttttggaactagtcacgggtgaaaaaccaactcacgtgtcgaatgcccccgaaaccttcaagggtaatttggtagaatggatacatctactatcagaaaaaaacgatcgccgttctgccatcgataag

SEQ ID NO: 2305 - DNA, 200 bp, Amaranthus palmeri
tttctcgggtattcgggagctacatacccaagatcaccaaattctccgttaacgaaagtgctcatgtgggtgtcaatcgggttcatgagtcttgcaagaccgaagtcggagagcttgggattgaaatcctcgtccaacaaaatacatttcgagcttatgtttctgtggaggattctagggttgcaattatgatgcatcca

SEQ ID NO: 2306 - DNA, 200 bp, Amaranthus palmeri
tggatgcatcataattgcaaccctagaatcctccacagaaacataagctcgaaatgtattttgttggacgaggatttcaatcccaagctctccgacttcggtcttgcaagactcatgaacccgattgacacccacatgagcactttcgttaacggagaatttggtgatcttgggtatgtagctcccgaatacccgagaaa

SEQ ID NO: 2307 - DNA, 200 bp, Amaranthus palmeri
tagggttgcaattatgatgcatccaagccaaccccttagctgcgccgatagaaattttaagcctcaaaggccaatccaagctcttagcctcaggatctgaagggtgaagcctatcgtagaggtttccgtttgccatatatttgtagaccaagaacctctctttctttgctgtgcagaagcccaacagcggtaccaagttt

SEQ ID NO: 2308 - DNA, 200 bp, Amaranthus palmeri
aaacttggtaccgctgttgggcttctgcacagcaaagaaagagaggttcttggtctacaaatatatggcaaacggaaacctctacgataggcttcacccttcagatcctgaggctaagagcttggattggcctttgaggcttaaaatttctatcggcgcagctaaggggttggcttggatgcatcataattgcaacccta

SEQ ID NO: 2309 - DNA, 200 bp, Amaranthus palmeri
gaagcccaacagcggtaccaagttttggtgcttcacacttccgagagtgttcatctcagacaaaaattctttctctgtccgctgtgaatcttgcaatcttttaaccgtaaggagcgttccatcaggcatcatcgccttgtacatcgttcccattcttccagaaccgatcatattgttgttgctgaagctattagtggctt

SEQ ID NO: 2310 - DNA, 200 bp, Amaranthus palmeri
aagccactaatagcttcagcaacaacaatatgatcggttctggaagaatgggaacgatgtacaaggcgatgatgcctgatggaacgctccttacggttaaaagattgcaagattcacagcggacagagaaagaatttttgtctgagatgaacactctcggaagtgtgaagcaccaaaacttggtaccgctgttgggcttc

SEQ ID NO: 2311 - DNA, 200 bp, Amaranthus palmeri
ttgttgctgaagctattagtggctttcatgaggtcatccaaactcattttcgaaattgtcttctcgaacatagaaacctgaatatcaagaaaaacattctacattacacacgcgtataaagaatggaaaatcagtaacaaactactcctgtctcacactacaagtcgcatacataaatatagtattgtcggatttcagca

SEQ ID NO: 2312 - DNA, 200 bp, Amaranthus palmeri
tgctgaaatccgacaatactatatttatgtatgcgacttgtagtgtgagacaggagtagtttgttactgattttccattctttatacgcgtgtgtaatgtagaatgtttttcttgatattcaggtttctatgttcgagaagacaatttcgaaaatgagtttggatgacctcatgaaagccactaatagcttcagcaacaa

SEQ ID NO: 2313 - DNA, 200 bp, Amaranthus palmeri
aatatagtattgtcggatttcagcaaagagttattgttatcggtcaaacaggagagctcaccaaaagactagcttattaggtgagagccatttgcctataaaccccacaccaattgcatacacaaccgatgtgggacaagttccataccctgcaatggaccataaatcgacccccataaggccaacgtccttgttgggtc

SEQ ID NO: 2314 - DNA, 200 bp, Amaranthus palmeri
gacccaacaaggacgttggccttatgggggtcgatttatggtccattgcagggtatggaacttgtcccacatcggttgtgtatgcaattggtgtggggtttataggcaaatggctctcacctaataagctagtcttttggtgagctctcctgtttgaccgataacaataactctttgctgaaatccgacaatactatatt

SEQ ID NO: 2315 - DNA, 200 bp, Amaranthus palmeri
ggtcacattttaacgggtcatcaacggattaggttaataaagggtcgggccattaacgggccttggtgtaaagggttgggcagagccgggtcaaataattataggaattggttgcaacattttttttttccactttttgtttttatattttagatattatatacaaagttaggttgacccaatgggccataaagttgaat

SEQ ID NO: 2316 - DNA, 200 bp, Amaranthus palmeri
attcaactttatggcccattgggtcaacctaactttgtatataatatctaaaatataaaaacaaaaagtggaaaaaaaaaatgttgcaaccaattcctataattatttgacccggctctgcccaaccctttacaccaaggcccgttaatggcccgaccctttattaacctaatccgttgatgacccgttaaaatgtgacc

SEQ ID NO: 2317 - DNA, 200 bp, Amaranthus palmeri
gacccaatgggccataaagttgaataaaaaaaactattacatgaacctttaaaaacgggtcaaagtgggcctggtttaaacgagctttgacccgtcctgccccgttgaaatttgacatgaccctccccgcctcgccctatttaaatttagctccatcccggcccattgaacacatctattcctaaaataactaacattat

SEQ ID NO: 2318 - DNA, 200 bp, Amaranthus palmeri
ataatgttagttattttaggaatagatgtgttcaatgggccgggatggagctaaatttaaatagggcgaggcggggagggtcatgtcaaatttcaacggggcaggacgggtcaaagctcgtttaaaccaggcccactttgacccgtttttaaaggttcatgtaatagttttttttattcaactttatggcccattgggtc

SEQ ID NO: 2319 - DNA, 200 bp, Amaranthus palmeri
ctattcctaaaataactaacattatgatggctcatcctattcgctaccatgcatgtaaatgtacacagtgtctatccgtttatccttttttatatccctgtataccatttgtgactaacggtattaattttttatcttccttgtaggttgaagatctatctagagagcctcaagtggaacgtgaacttatgcttttaaag

SEQ ID NO: 2320 - DNA, 200 bp, Amaranthus palmeri
ctttaaaagcataagttcacgttccacttgaggctctctagatagatcttcaacctacaaggaagataaaaaattaataccgttagtcacaaatggtatacagggatataaaaaaggataaacggatagacactgtgtacatttacatgcatggtagcgaataggatgagccatcataatgttagttattttaggaatag

SEQ ID NO: 2321 - DNA, 200 bp, Amaranthus palmeri
ggaacgtgaacttatgcttttaaagcttcattctaatgcagatacccatgctgaggtagttccaccagttcaaataattatatcctgaacgctatataattcatgaatcttttattttcctcttagaatcatcagctacaagaagttagataaagatgagcaaatgttcaaaaatatgctataacatcatgtgctttgta

SEQ ID NO: 2322 - DNA, 200 bp, Amaranthus palmeri
tacaaagcacatgatgttatagcatatttttgaacatttgctcatctttatctaacttcttgtagctgatgattctaagaggaaaataaaagattcatgaattatatagcgttcaggatataattatttgaactggtggaactacctcagcatgggtatctgcattagaatgaagctttaaaagcataagttcacgttcc

SEQ ID NO: 2323 - DNA, 200 bp, Amaranthus palmeri
atgctataacatcatgtgctttgtaagctttaaacttagagataacaaaaatacttaagaatacatcatgggtatgtagctgaagatcaaatgggaagttacattgcttctttgtgtgtattgtaaacaatctggtatcgtataagtccaaattccattttttgattttcagataatgtggttagtggacatcttcaggg

SEQ ID NO: 2324 - DNA, 200 bp, Amaranthus palmeri
ccctgaagatgtccactaaccacattatctgaaaatcaaaaaatggaatttggacttatacgataccagattgtttacaatacacacaaagaagcaatgtaacttcccatttgatcttcagctacatacccatgatgtattcttaagtatttttgttatctctaagtttaaagcttacaaagcacatgatgttatagcat

SEQ ID NO: 2325 - DNA, 200 bp, Amaranthus palmeri
atgtggttagtggacatcttcagggcaaaaattgtcgatatgtcggaaagcttcgttactgtagaggttagtatgtttgtggttgacatcttgtgtacctatcttccgttcaatgtagattctttttcttagtgctattttattttctgtcgtgcaggtgactggcgatcctggaaagatggctgctgtcctgagaaatt

SEQ ID NO: 2326 - DNA, 200 bp, Amaranthus palmeri
aatttctcaggacagcagccatctttccaggatcgccagtcacctgcacgacagaaaataaaatagcactaagaaaaagaatctacattgaacggaagataggtacacaagatgtcaaccacaaacatactaacctctacagtaacgaagctttccgacatatcgacaatttttgccctgaagatgtccactaaccacat

SEQ ID NO: 2327 - DNA, 200 bp, Amaranthus palmeri
aagatggctgctgtcctgagaaattttagcaagtatggaatcaaagaagttgccagaacaggaaaggtcagtcttttagacaattgcagtaaattcaccggaatactatgaatgatgcaaagattacgtgcggtaaatcgtaaacaggctgttgaatctcttcaactaaattatatctaatgcgaagtgcgtttattcaa

SEQ ID NO: 2328 - DNA, 200 bp, Amaranthus palmeri
ttgaataaacgcacttcgcattagatataatttagttgaagagattcaacagcctgtttacgatttaccgcacgtaatctttgcatcattcatagtattccggtgaatttactgcaattgtctaaaagactgacctttcctgttctggcaacttctttgattccatacttgctaaaatttctcaggacagcagccatctt

SEQ ID NO: 2329 - DNA, 200 bp, Amaranthus palmeri
tctaatgcgaagtgcgtttattcaactaccttttttgtgtgaaatgatagattgctctaagacgagaaaggatgggcgagacagctcctttttggagattctctgctgcatcttatccagatctagaagaaaaggctgttgaatcttttgtcaggcctgcaaaaagaagcatcaatgctgatcctggctcatcgtctagt

SEQ ID NO: 2330 - DNA, 200 bp, Amaranthus palmeri
actagacgatgagccaggatcagcattgatgcttctttttgcaggcctgacaaaagattcaacagccttttcttctagatctggataagatgcagcagagaatctccaaaaaggagctgtctcgcccatcctttctcgtcttagagcaatctatcatttcacacaaaaaaggtagttgaataaacgcacttcgcattaga

SEQ ID NO: 2331 - DNA, 200 bp, Amaranthus palmeri
tgctgatcctggctcatcgtctagtgtaagtgaagttttatttgctcaacatttatcttatccttctcttactttgtcttgcattagcgtatattctttttggtaattacaaatttagttttttttaaatgttcctagggtgatgttattattgacattgataaatattcttattggtagtatatagatatattatattt

SEQ ID NO: 2332 - DNA, 200 bp, Amaranthus palmeri
aaatataatatatctatatactaccaataagaatatttatcaatgtcaataataacatcaccctaggaacatttaaaaaaaactaaatttgtaattaccaaaaagaatatacgctaatgcaagacaaagtaagagaaggataagataaatgttgagcaaataaaacttcacttacactagacgatgagccaggatcagca

SEQ ID NO: 2333 - DNA, 200 bp, Amaranthus palmeri
ggtagtatatagatatattatatttcccatagattgctctaagacaggtggcgtatatccgcccgtccgaaaccccgccaagtctcatacgggcatacggcccgtttggtaactggcaatgataatgaatgttagtataattttggtaagaatatcttctcataaacttaatgactttacttattctccttcaacaagct

SEQ ID NO: 2334 - DNA, 200 bp, Amaranthus palmeri
agcttgttgaaggagaataagtaaagtcattaagtttatgagaagatattcttaccaaaattatactaacattcattatcattgccagttaccaaacgggccgtatgcccgtatgagacttggcggggtttcggacgggcggatatacgccacctgtcttagagcaatctatgggaaatataatatatctatatactacc

SEQ ID NO: 2335 - DNA, 200 bp, Amaranthus palmeri
tttacttattctccttcaacaagctcattttccttacaaaattctttataatgcatcaccacttaaacctgtggtataaggtggtactgaaatattgtgaacaaaaacacttttttattattaaaatttcattaccatagtgatgacatgatacatattatgaagatttacactacaaatcattcccattaccaccattt

SEQ ID NO: 2336 - DNA, 200 bp, Amaranthus palmeri
aaatggtggtaatgggaatgatttgtagtgtaaatcttcataatatgtatcatgtcatcactatggtaatgaaattttaataataaaaaagtgtttttgttcacaatatttcagtaccaccttataccacaggtttaagtggtgatgcattataaagaattttgtaaggaaaatgagcttgttgaaggagaataagtaaa

SEQ ID NO: 2337 - DNA, 200 bp, Amaranthus palmeri
caaatcattcccattaccaccatttagaaccattagcctaacgggcagttaatgcattgggataatggagtggaaaaaacgttaattgtcatttatgaactcaattttttgttttgggtttggcacttttgcatttggaatttaaaatgcgtttattcaatgaagggtgatgtttatccagtggagccttatgatgcctc

SEQ ID NO: 2338 - DNA, 200 bp, Amaranthus palmeri
gaggcatcataaggctccactggataaacatcacccttcattgaataaacgcattttaaattccaaatgcaaaagtgccaaacccaaaacaaaaaattgagttcataaatgacaattaacgttttttccactccattatcccaatgcattaactgcccgttaggctaatggttctaaatggtggtaatgggaatgatttg

SEQ ID NO: 2339 - DNA, 200 bp, Amaranthus palmeri
atccagtggagccttatgatgcctccataaatacagtacttgatgctcactggggagttctttacgaagatgatgtaagttctctttgtcactacctgaattttgttcatcttgttgcacactttcatatgatgtgatcttcagatcttttacttaatttactaaatggcttcataattttcccagaatggcctaaaatt

SEQ ID NO: 2340 - DNA, 200 bp, Amaranthus palmeri
aattttaggccattctgggaaaattatgaagccatttagtaaattaagtaaaagatctgaagatcacatcatatgaaagtgtgcaacaagatgaacaaaattcaggtagtgacaaagagaacttacatcatcttcgtaaagaactccccagtgagcatcaagtactgtatttatggaggcatcataaggctccactggat

SEQ ID NO: 2341 - DNA, 200 bp, Amaranthus palmeri
aattttcccagaatggcctaaaattcgttagtttcggttcataattatttaagtcatgtcaaactttccttaagaccggctctatcgaatctttagccttatttgggaggttctggttaatgtctttcaatatttggcttacttgttcatcctcagaactttcatatttgtttgattttaagcaacgttattagaattga

SEQ ID NO: 2342 - DNA, 200 bp, Amaranthus palmeri
tcaattctaataacgttgcttaaaatcaaacaaatatgaaagttctgaggatgaacaagtaagccaaatattgaaagacattaaccagaacctcccaaataaggctaaagattcgatagagccggtcttaaggaaagtttgacatgacttaaataattatgaaccgaaactaacgaattttaggccattctgggaaaatt

SEQ ID NO: 2343 - DNA, 200 bp, Amaranthus palmeri
ttttaagcaacgttattagaattgagattctacaacactacgattctacctacgatctagattgctcgcttgtttcggatcgtattatagtagaattgtagatcagaatcatgattttaataactatggttttaagaatggagtagtttaataaatctgttctgttagtattctgatgtactttcaacatgccagtcaag

SEQ ID NO: 2344 - DNA, 200 bp, Amaranthus palmeri
cttgactggcatgttgaaagtacatcagaatactaacagaacagatttattaaactactccattcttaaaaccatagttattaaaatcatgattctgatctacaattctactataatacgatccgaaacaagcgagcaatctagatcgtaggtagaatcgtagtgttgtagaatctcaattctaataacgttgcttaaaa

SEQ ID NO: 2345 - DNA, 200 bp, Amaranthus palmeri
atgtactttcaacatgccagtcaagcggacttgtgtcacatactctgtccatgctggtaaataatgctcctggagttctgaacaccgttacaggagtaattgctcgtagaggttataacattcaggtcagtacggactctgactgcaccatgaaagtatatctcgtcttttgcattatgttaagttgattgtcccttttc

SEQ ID NO: 2346 - DNA, 200 bp, Amaranthus palmeri
gaaaagggacaatcaacttaacataatgcaaaagacgagatatactttcatggtgcagtcagagtccgtactgacctgaatgttataacctctacgagcaattactcctgtaacggtgttcagaactccaggagcattatttaccagcatggacagagtatgtgacacaagtccgcttgactggcatgttgaaagtacat

SEQ ID NO: 2347 - DNA, 200 bp, Amaranthus palmeri
tatgttaagttgattgtcccttttccttcttcccagagtcttgctgtgggccctgctgaaaaggagggtctttctcgtatcacaactgttgttcctggaaacgacgagtcaattgcaaaattggttcagcaattaaacaaattagtagaccttcatgaggtgagcatctatttgcgttcaacgtagacataatcgtccaa

SEQ ID NO: 2348 - DNA, 200 bp, Amaranthus palmeri
ttggacgattatgtctacgttgaacgcaaatagatgctcacctcatgaaggtctactaatttgtttaattgctgaaccaattttgcaattgactcgtcgtttccaggaacaacagttgtgatacgagaaagaccctccttttcagcagggcccacagcaagactctgggaagaaggaaaagggacaatcaacttaacata

SEQ ID NO: 2349 - DNA, 200 bp, Amaranthus palmeri
gttcaacgtagacataatcgtccaaattagttagtgtcatgtttacttatgtgttaatattattttgatttttgtttttttgactattaacatgcaaaacagtactttacctctctactaacgtgtgccgaggcccaaggtttctacctaggatcgatgagaggttaagatcgaaatcaatgcaaccggatcgtagaatt

SEQ ID NO: 2350 - DNA, 200 bp, Amaranthus palmeri
aattctacgatccggttgcattgatttcgatcttaacctctcatcgatcctaggtagaaaccttgggcctcggcacacgttagtagagaggtaaagtactgttttgcatgttaatagtcaaaaaaacaaaaatcaaaataatattaacacataagtaaacatgacactaactaatttggacgattatgtctacgttgaac

SEQ ID NO: 2351 - DNA, 200 bp, Amaranthus palmeri
atcaatgcaaccggatcgtagaattgtatacattaatttgctcagcgtaactgatcatcaattatatttgttatttttagtgttttgaggcgtaagccgtaaatcaaaattatttgacttcatctattaagttgtgaaaaataacaattttaataagcattgaaactgcaaatcaagaaaaatatgaattttatagtcat

SEQ ID NO: 2352 - DNA, 200 bp, Amaranthus palmeri
atgactataaaattcatatttttcttgatttgcagtttcaatgcttattaaaattgttatttttcacaacttaatagatgaagtcaaataattttgatttacggcttacgcctcaaaacactaaaaataacaaatataattgatgatcagttacgctgagcaaattaatgtatacaattctacgatccggttgcattgat

SEQ ID NO: 2353 - DNA, 200 bp, Amaranthus palmeri
agaaaaatatgaattttatagtcatattgttataataattttacatatgtttatatatattcgaattctagattttaagataaattttttacgattgagactactcacataggaactgatcgttgaattgtaggatcgtgaatcgtgttatgatctaaccccctaaattcttgagataagtgtgatgatacgatcctacc

SEQ ID NO: 2354 - DNA, 200 bp, Amaranthus palmeri
ggtaggatcgtatcatcacacttatctcaagaatttagggggttagatcataacacgattcacgatcctacaattcaacgatcagttcctatgtgagtagtctcaatcgtaaaaaatttatcttaaaatctagaattcgaatatatataaacatatgtaaaattattataacaatatgactataaaattcatatttttct

SEQ ID NO: 2355 - DNA, 200 bp, Amaranthus palmeri
ataagtgtgatgatacgatcctaccaactataagatcccacctacaatccggattgattgccaatttttggatcgtggattgggattgggattctgataaccatgtcgaggcctaaagagaacaaaagagatgaaaggagttaacaccaattctttagctttgtgcttgtatcaacaaaacaccatgcgagattcttgtt

SEQ ID NO: 2356 - DNA, 200 bp, Amaranthus palmeri
aacaagaatctcgcatggtgttttgttgatacaagcacaaagctaaagaattggtgttaactcctttcatctcttttgttctctttaggcctcgacatggttatcagaatcccaatcccaatccacgatccaaaaattggcaatcaatccggattgtaggtgggatcttatagttggtaggatcgtatcatcacacttat

SEQ ID NO: 2357 - DNA, 200 bp, Amaranthus palmeri
caaaacaccatgcgagattcttgttattctaaaagccctattcagcccgtacctatcatttgttttatatcgaatcagtgaagctaagtcgagtaacatttttcgtgtaatctttaattgcgtagataattcagatatcttgcacgctcttcaattctctactatggagttctgattgtcttgtagtttgtatataagta

SEQ ID NO: 2358 - DNA, 200 bp, Amaranthus palmeri
tacttatatacaaactacaagacaatcagaactccatagtagagaattgaagagcgtgcaagatatctgaattatctacgcaattaaagattacacgaaaaatgttactcgacttagcttcactgattcgatataaaacaaatgataggtacgggctgaatagggcttttagaataacaagaatctcgcatggtgttttg

SEQ ID NO: 2359 - DNA, 200 bp, Amaranthus palmeri
ttgtcttgtagtttgtatataagtactacaattatgattgaaagattagaacatcttattccggaaaggttgttgtcgcagattcaggaccttacgcaccagccatttgcagagcgagagcttatgttaattaaagtagcggcaaatacttcggccaggagagacgtccttgatattgctaatatattccgtgcaaaacc

SEQ ID NO: 2360 - DNA, 200 bp, Amaranthus palmeri
ggttttgcacggaatatattagcaatatcaaggacgtctctcctggccgaagtatttgccgctactttaattaacataagctctcgctctgcaaatggctggtgcgtaaggtcctgaatctgcgacaacaacctttccggaataagatgttctaatctttcaatcataattgtagtacttatatacaaactacaagacaa

SEQ ID NO: 2361 - DNA, 200 bp, Amaranthus palmeri
ttgctaatatattccgtgcaaaacctgtggatgtttctgatcacacaataacattacaagtaagcataaatgaatttggtagtttatttagtcttctcttgttactctcaacaatgtctattcacaaattcttgtgtgagacggtctcaccgtgatacgttccccatacatggattgaatagcccaactaatacaattat

SEQ ID NO: 2362 - DNA, 200 bp, Amaranthus palmeri
ataattgtattagttgggctattcaatccatgtatggggaacgtatcacggtgagaccgtctcacacaagaatttgtgaatagacattgttgagagtaacaagagaagactaaataaactaccaaattcatttatgcttacttgtaatgttattgtgtgatcagaaacatccacaggttttgcacggaatatattagcaa

SEQ ID NO: 2363 - DNA, 200 bp, Amaranthus palmeri
tgaatagcccaactaatacaattatcagcatatgagcttcaattagtctcttacaagagtaaatcatgtctatatccttatttcgatggtccatttcgaattgaaacgaatataaataaaaagctaatggaatgcgagtatttcactaataacgaaaaccgtagggagctaagacagtttacggtattgaggatctctgt

SEQ ID NO: 2364 - DNA, 200 bp, Amaranthus palmeri
acagagatcctcaataccgtaaactgtcttagctccctacggttttcgttattagtgaaatactcgcattccattagctttttatttatattcgtttcaattcgaaatggaccatcgaaataaggatatagacatgatttactcttgtaagagactaattgaagctcatatgctgataattgtattagttgggctattca

SEQ ID NO: 2365 - DNA, 200 bp, Amaranthus palmeri
agtttacggtattgaggatctctgtaatttgtctttgtttttttcagcttgccggtgatttagacaaaatggttgcgctacagagattattggagccttacggcatctgtgaggtatgtttatatgcatatttatttctcccgaaaccgattagaatcatttcatgtgttcgggtcaaataggaaatatatggccatttg

SEQ ID NO: 2366 - DNA, 200 bp, Amaranthus palmeri
caaatggccatatatttcctatttgacccgaacacatgaaatgattctaatcggtttcgggagaaataaatatgcatataaacatacctcacagatgccgtaaggctccaataatctctgtagcgcaaccattttgtctaaatcaccggcaagctgaaaaaaacaaagacaaattacagagatcctcaataccgtaaact

SEQ ID NO: 2367 - DNA, 200 bp, Amaranthus palmeri
caaataggaaatatatggccatttgtagcttttcaatagactccgagaaggcgagaacccttatctccttaactactaaaacatttacagctcgttgattgtcggtaataaaaggtgatattgagaataatttgtagtgtaaatttttcatgattgtattatatcattccctgggtaatgaatagttaatcataaaaaaa

SEQ ID NO: 2368 - DNA, 200 bp, Amaranthus palmeri
tttttttatgattaactattcattacccagggaatgatataatacaatcatgaaaaatttacactacaaattattctcaatatcaccttttattaccgacaatcaacgagctgtaaatgttttagtagttaaggagataagggttctcgccttctcggagtctattgaaaagctacaaatggccatatatttcctatttg

SEQ ID NO: 2369 - DNA, 200 bp, Amaranthus palmeri
taatgaatagttaatcataaaaaaactttttttttcgcaatttttcattaccatttgtgtcacctctacgaatggtaatgcatatgattgattgaatgagctttatgaaggaaataagatgattgaagtaaatcaatcaagatcgttaaacttgtaaagagattttctcaccaaacttactctaaatttcatttccattt

SEQ ID NO: 2370 - DNA, 200 bp, Amaranthus palmeri
aaatggaaatgaaatttagagtaagtttggtgagaaaatctctttacaagtttaacgatcttgattgatttacttcaatcatcttatttccttcataaagctcattcaatcaatcatatgcattaccattcgtagaggtgacacaaatggtaatgaaaaattgcgaaaaaaaaagtttttttatgattaactattcatta

SEQ ID NO: 2371 - DNA, 200 bp, Amaranthus palmeri
cttactctaaatttcatttccatttccactattcaataccgataactaaacgggcatcagcaccatttagtcgagtacttgatttcaattcaatttaattcagttcagtttagttgtaagtagttctggagatagcgaacttcaatgatcatggactgactgtaacattttatatctgtcttcaaggtggcacggactgg

SEQ ID NO: 2372 - DNA, 200 bp, Amaranthus palmeri
ccagtccgtgccaccttgaagacagatataaaatgttacagtcagtccatgatcattgaagttcgctatctccagaactacttacaactaaactgaactgaattaaattgaattgaaatcaagtactcgactaaatggtgctgatgcccgtttagttatcggtattgaatagtggaaatggaaatgaaatttagagtaag

SEQ ID NO: 2373 - DNA, 200 bp, Amaranthus palmeri
ctgtcttcaaggtggcacggactggaagagtagcactagctcgagagtctagggtagattccaagtatttacgaggatacactcttccgttgtatgaatgaaaaactccggctatgtctttccgacattaccttgtccgattccttccgctcttctacactgcattacgggcagaacaattgcccacgagtagagtaaat

SEQ ID NO: 2374 - DNA, 200 bp, Amaranthus palmeri
atttactctactcgtgggcaattgttctgcccgtaatgcagtgtagaagagcggaaggaatcggacaaggtaatgtcggaaagacatagccggagtttttcattcatacaacggaagagtgtatcctcgtaaatacttggaatctaccctagactctcgagctagtgctactcttccagtccgtgccaccttgaagacag

SEQ ID NO: 2375 - DNA, 200 bp, Amaranthus rudis
agcagtttatatgtttgttgaactgtatactgtataatggctgattcaaatgtggaagttgatatgatccttttaagttttaaggtgtagggagaagttgtttcttcaattcagtaatgatagagtatataatatatgatccttggttttcgaccatatcacatgttcgaatctagcctcatatataacatatcttgagg

SEQ ID NO: 2376 - DNA, 200 bp, Amaranthus rudis
cctcaagatatgttatatatgaggctagattcgaacatgtgatatggtcgaaaaccaaggatcatatattatatactctatcattactgaattgaagaaacaacttctccctacaccttaaaacttaaaaggatcatatcaacttccacatttgaatcagccattatacagtatacagttcaacaaacatataaactgct

SEQ ID NO: 2377 - DNA, 200 bp, Amaranthus rudis
gcctcatatataacatatcttgaggcttccaccatcagcttaaacttcggttgagttggttccctgtgaacttctcgccttcgcttcacctttatgcttggtttcagccttgcaaagttgctagtcgtggagagggttacttcaggaaggctgtcagcatatatcactggcactgcatatctttttgaatacaaaatcat

SEQ ID NO: 2378 - DNA, 200 bp, Amaranthus rudis
atgattttgtattcaaaaagatatgcagtgccagtgatatatgctgacagccttcctgaagtaaccctctccacgactagcaactttgcaaggctgaaaccaagcataaaggtgaagcgaaggcgagaagttcacagggaaccaactcaaccgaagtttaagctgatggtggaagcctcaagatatgttatatatgaggc

SEQ ID NO: 2379 - DNA, 200 bp, Amaranthus rudis
catatctttttgaatacaaaatcatttttaaggaaatgactcttccatttatgtgtacttatttatgtaaagttgcaaatgatgtttgctaccaagagtcaaccggaaaaaacttctttgttatcaataacaagggtaatattgcgtacattccccctaaatcccaaaccccagcctagttggaagccactgaattgcaa

SEQ ID NO: 2380 - DNA, 200 bp, Amaranthus rudis
ttgcaattcagtggcttccaactaggctggggtttgggatttagggggaatgtacgcaatattacccttgttattgataacaaagaagttttttccggttgactcttggtagcaaacatcatttgcaactttacataaataagtacacataaatggaagagtcatttccttaaaaatgattttgtattcaaaaagatatg

SEQ ID NO: 2381 - DNA, 200 bp, Amaranthus rudis
ctagttggaagccactgaattgcaatagtgtaatggaaatgttgttctatatatatttggttatcttaatgtatcttgttatctacacctgcttctcaggtaataaaacagattcaaaatctgatatttcatgtatttcattttgtgtatacagagtgatgcgtcacacaatttctgtctttgttggcgatgaaagtggg

SEQ ID NO: 2382 - DNA, 200 bp, Amaranthus rudis
cccactttcatcgccaacaaagacagaaattgtgtgacgcatcactctgtatacacaaaatgaaatacatgaaatatcagattttgaatctgttttattacctgagaagcaggtgtagataacaagatacattaagataaccaaatatatatagaacaacatttccattacactattgcaattcagtggcttccaactag

SEQ ID NO: 2383 - DNA, 200 bp, Amaranthus rudis
tgtctttgttggcgatgaaagtgggataatcaataggattgccggcgttatttctagaagaggatacaatatcgagtctctggctgttggtttaaacaaggataaggctctttttactatagtagtgtgtgggactgacaaggtgttacgtcaagtcgtggaacagcttaacaagcttgttagtgtcttgaaggtagtta

SEQ ID NO: 2384 - DNA, 200 bp, Amaranthus rudis
taactaccttcaagacactaacaagcttgttaagctgttccacgacttgacgtaacaccttgtcagtcccacacactactatagtaaaaagagccttatccttgtttaaaccaacagccagagactcgatattgtatcctcttctagaaataacgccggcaatcctattgattatcccactttcatcgccaacaaagaca

SEQ ID NO: 2385 - DNA, 200 bp, Amaranthus rudis
cttgttagtgtcttgaaggtagttaatttcatttgttcatccttttattggtaaatggtgatagtcatactatgacatagtgcttggttcagtactgtacggattgcgttcgataaaattactttacaagtcttataaacccattttccaaactagcttatacaaacaaaacatatcgtgaatttttttttacttaaata

SEQ ID NO: 2386 - DNA, 200 bp, Amaranthus rudis
tatttaagtaaaaaaaaattcacgatatgttttgtttgtataagctagtttggaaaatgggtttataagacttgtaaagtaattttatcgaacgcaatccgtacagtactgaaccaagcactatgtcatagtatgactatcaccatttaccaataaaaggatgaacaaatgaaattaactaccttcaagacactaacaag

SEQ ID NO: 2387 - DNA, 200 bp, Amaranthus rudis
tcgtgaatttttttttacttaaatagaaatgttattgtttaatatggagccttacgtatcaagcaatataatggatcatcttatatgcatatgtttgtacaatgtacatgttttgttggattgtctaattgtcctatataacatccttagacgattactgcattgcttgtaggttgaagatctatcgagagagccgcaag

SEQ ID NO: 2388 - DNA, 200 bp, Amaranthus rudis
cttgcggctctctcgatagatcttcaacctacaagcaatgcagtaatcgtctaaggatgttatataggacaattagacaatccaacaaaacatgtacattgtacaaacatatgcatataagatgatccattatattgcttgatacgtaaggctccatattaaacaataacatttctatttaagtaaaaaaaaattcacga

SEQ ID NO: 2389 - DNA, 200 bp, Amaranthus rudis
gaagatctatcgagagagccgcaagtggaacgtgaactgatgcttttaaagcttaattctgatgcaaattcccacgcagaggtagattcacaaattcaatcaataatctatgaaggctatattttccatgttttaagttctaatttcctcgtctagttgtcagttagagtctagcaaggaacaaaagatagagatgtttt

SEQ ID NO: 2390 - DNA, 200 bp, Amaranthus rudis
aaaacatctctatcttttgttccttgctagactctaactgacaactagacgaggaaattagaacttaaaacatggaaaatatagccttcatagattattgattgaatttgtgaatctacctctgcgtgggaatttgcatcagaattaagctttaaaagcatcagttcacgttccacttgcggctctctcgatagatcttc

SEQ ID NO: 2391 - DNA, 200 bp, Amaranthus rudis
aaggaacaaaagatagagatgttttgctttagcttttatccatgatcaaaaaatatgctatacttcatataaggccatgactgttacaacaacaacaacaacaatgccagagccttagtcccaaaagttcatagatgttagataactcaaatttatctagaagtacatcgtgttgtgtgaagctcttataagaagttgca

SEQ ID NO: 2392 - DNA, 200 bp, Amaranthus rudis
tgcaacttcttataagagcttcacacaacacgatgtacttctagataaatttgagttatctaacatctatgaacttttgggactaaggctctggcattgttgttgttgttgttgtaacagtcatggccttatatgaagtatagcatattttttgatcatggataaaagctaaagcaaaacatctctatcttttgttcctt

SEQ ID NO: 2393 - DNA, 200 bp, Amaranthus rudis
tgtgaagctcttataagaagttgcagtagtgtttttgtgagaaatctaataccaattaacgtaaatcttcaatttttgatcttcagctaatgtggctagtggacatcttcagggcaaaaattgtggatatctcagaaagcttggtcactgttgaggttagtggtgtctttgtttgatttctcgcgtacgtcttctaagcg

SEQ ID NO: 2394 - DNA, 200 bp, Amaranthus rudis
cgcttagaagacgtacgcgagaaatcaaacaaagacaccactaacctcaacagtgaccaagctttctgagatatccacaatttttgccctgaagatgtccactagccacattagctgaagatcaaaaattgaagatttacgttaattggtattagatttctcacaaaaacactactgcaacttcttataagagcttcaca

SEQ ID NO: 2395 - DNA, 200 bp, Amaranthus rudis
atttctcgcgtacgtcttctaagcgtaccttccagaagttgacctgagatctgaccagtcgatgtaaaatttttttcttagtggcattttctttggtgttgcaggtgactggagatcctggaaagttggctgctgttctaagaaattttagcaagtttggaatcaaagaaattgcaaggaccggaaaggttagtctttta

SEQ ID NO: 2396 - DNA, 200 bp, Amaranthus rudis
taaaagactaacctttccggtccttgcaatttctttgattccaaacttgctaaaatttcttagaacagcagccaactttccaggatctccagtcacctgcaacaccaaagaaaatgccactaagaaaaaaattttacatcgactggtcagatctcaggtcaacttctggaaggtacgcttagaagacgtacgcgagaaat

SEQ ID NO: 2397 - DNA, 200 bp, Amaranthus rudis
aaggaccggaaaggttagtcttttagacatttgctgtaagttcagtatagaattcggaaaggcgcaaagagtacatgtcaactattgtggctagccaggcaactattgtgcatttctggtgagatcaatgtgaaacaagtttagttaactacttgttttgttttatatacttaatatgatagattgctctaaggcgagaa

SEQ ID NO: 2398 - DNA, 200 bp, Amaranthus rudis
ttctcgccttagagcaatctatcatattaagtatataaaacaaaacaagtagttaactaaacttgtttcacattgatctcaccagaaatgcacaatagttgcctggctagccacaatagttgacatgtactctttgcgcctttccgaattctatactgaacttacagcaaatgtctaaaagactaacctttccggtcctt

SEQ ID NO: 2399 - DNA, 200 bp, Amaranthus rudis
atgatagattgctctaaggcgagaaaagatgggtcagacagctcctttttggagattctctgctgcttcttatccagatctacaagaaaaggctgttgatgctcttgccaggcctatgaaacggagcgtcaatggtgattctggctcatcttcaagtgtaagtgaaattttatcttctcgacaattatctttttcctttt

SEQ ID NO: 2400 - DNA, 200 bp, Amaranthus rudis
aaaaggaaaaagataattgtcgagaagataaaatttcacttacacttgaagatgagccagaatcaccattgacgctccgtttcataggcctggcaagagcatcaacagccttttcttgtagatctggataagaagcagcagagaatctccaaaaaggagctgtctgacccatcttttctcgccttagagcaatctatcat

SEQ ID NO: 2401 - DNA, 200 bp, Amaranthus rudis
tctcgacaattatctttttccttttctcaccttgcattgcctatgtatactttttaccttgtattgcctatagacttaaacatgcttttattttttgaagggtgatgtttatccggtggaaccttatgatgtttcgatggtaaatcaagtacttgatgctcactggggcgtactttatgacggtgatgtaagtgctctat

SEQ ID NO: 2402 - DNA, 200 bp, Amaranthus rudis
atagagcacttacatcaccgtcataaagtacgccccagtgagcatcaagtacttgatttaccatcgaaacatcataaggttccaccggataaacatcacccttcaaaaaataaaagcatgtttaagtctataggcaatacaaggtaaaaagtatacataggcaatgcaaggtgagaaaaggaaaaagataattgtcgaga

SEQ ID NO: 2403 - DNA, 200 bp, Amaranthus rudis
tatgacggtgatgtaagtgctctatcactacctgaattgtctgtcactaggtcgtccaatggtccatgtgatgtcatgttcaaatctcttaggccaatgtttcctaatttagttccaaatcaattgtctgaattcacgattcacccaaaatggcctaaatttttcgttttaatttacaaatgaccgagtcatgacaaaca

SEQ ID NO: 2404 - DNA, 200 bp, Amaranthus rudis
tgtttgtcatgactcggtcatttgtaaattaaaacgaaaaatttaggccattttgggtgaatcgtgaattcagacaattgatttggaactaaattaggaaacattggcctaagagatttgaacatgacatcacatggaccattggacgacctagtgacagacaattcaggtagtgatagagcacttacatcaccgtcata

SEQ ID NO: 2405 - DNA, 200 bp, Amaranthus rudis
acaaatgaccgagtcatgacaaacatgtattaaggtctgctctatgttacttggactcgggtactgagtcggatactggtacgtgtccaagtgtcatatgcgtctcaatattcaattttacgcctaaaaggaagtgtctaagtgtcataccaatgtccgagcatcaatgatcggtcactggtacgtgaagcaaaatgaag

SEQ ID NO: 2406 - DNA, 200 bp, Amaranthus rudis
cttcattttgcttcacgtaccagtgaccgatcattgatgctcggacattggtatgacacttagacacttccttttaggcgtaaaattgaatattgagacgcatatgacacttggacacgtaccagtatccgactcagtacccgagtccaagtaacatagagcagaccttaatacatgtttgtcatgactcggtcatttgt

SEQ ID NO: 2407 - DNA, 200 bp, Amaranthus rudis
cactggtacgtgaagcaaaatgaagagtctgagtaatagcggttcaatctcatttggattttggagggttaaggtttatgtttttgggttttcagatgttcgtctttctgttattcatgtttaattttaagaatgaaagttagttcaacttttcaattttttgagctgcacagtactataaattggttttagtctgctct

SEQ ID NO: 2408 - DNA, 200 bp, Amaranthus rudis
agagcagactaaaaccaatttatagtactgtgcagctcaaaaaattgaaaagttgaactaactttcattcttaaaattaaacatgaataacagaaagacgaacatctgaaaacccaaaaacataaaccttaaccctccaaaatccaaatgagattgaaccgctattactcagactcttcattttgcttcacgtaccagtg

SEQ ID NO: 2409 - DNA, 200 bp, Amaranthus rudis
ctataaattggttttagtctgctctgctagtatcctgatttgcttcgttcttcatgccagtcaagtggtctccggtcacatacgctgtccatgctggtaaataatgctcccggagttcttaacactgttacaggagtaatttctcgtaggggttataacattcaggtcagtgtggactctgactgcagcaagaaagtata

SEQ ID NO: 2410 - DNA, 200 bp, Amaranthus rudis
tatactttcttgctgcagtcagagtccacactgacctgaatgttataacccctacgagaaattactcctgtaacagtgttaagaactccgggagcattatttaccagcatggacagcgtatgtgaccggagaccacttgactggcatgaagaacgaagcaaatcaggatactagcagagcagactaaaaccaatttatag

SEQ ID NO: 2411 - DNA, 200 bp, Amaranthus rudis
actctgactgcagcaagaaagtatataaagccgtttgtgttatgtaatgacaatcgtccccttttcatcctcttcagagtcttgccgtaggccctgctgaaaaggagggtctttctcgtatcacaactgtcattcctggaaacgatgagtcgattggaaaattggttcagcaatttaacaagttagtagaccttcatgag

SEQ ID NO: 2412 - DNA, 200 bp, Amaranthus rudis
ctcatgaaggtctactaacttgttaaattgctgaaccaattttccaatcgactcatcgtttccaggaatgacagttgtgatacgagaaagaccctccttttcagcagggcctacggcaagactctgaagaggatgaaaaggggacgattgtcattacataacacaaacggctttatatactttcttgctgcagtcagagt

SEQ ID NO: 2413 - DNA, 200 bp, Amaranthus rudis
taacaagttagtagaccttcatgaggtgagcaactatttatacttctgatgttttttttttttgaataatttgcaatttacaagttacaaccataaagttaaaacttcatgttaagcatgcacacccgcgtaatatttttttttgggcaaatttcagcataaaagttttttcgaaatgatgtttaagcttgttgtacttc

SEQ ID NO: 2414 - DNA, 200 bp, Amaranthus rudis
gaagtacaacaagcttaaacatcatttcgaaaaaacttttatgctgaaatttgcccaaaaaaaaatattacgcgggtgtgcatgcttaacatgaagttttaactttatggttgtaacttgtaaattgcaaattattcaaaaaaaaaaaacatcagaagtataaatagttgctcacctcatgaaggtctactaacttgtta

SEQ ID NO: 2415 - DNA, 200 bp, Amaranthus rudis
atgatgtttaagcttgttgtacttcaatgactcgatgaagagaatttgcgtttaaagagagagggagaatgttggatacaaagtgagagaataggtagttcttttgaattggaggagagtagtgattgatttagtcaaacacaattagtgacggtcaacaactgctcggtgagttaaaaaaatttagttgttaatcgggc

SEQ ID NO: 2416 - DNA, 200 bp, Amaranthus rudis
gcccgattaacaactaaatttttttaactcaccgagcagttgttgaccgtcactaattgtgtttgactaaatcaatcactactctcctccaattcaaaagaactacctattctctcactttgtatccaacattctccctctctctttaaacgcaaattctcttcatcgagtcattgaagtacaacaagcttaaacatcat

SEQ ID NO: 2417 - DNA, 200 bp, Amaranthus rudis
aaaaaaatttagttgttaatcgggctgaaatcggtgagctggtagcaatcaaatgcccgagctctctttcatgggtcgtaagtggtataggccatgtcccttgtttagtgggtcaaagatttatagttctttggtttcaaattatgataaactatattaagatgaccgactaaaatcatgtgcacttcttatttacctga

SEQ ID NO: 2418 - DNA, 200 bp, Amaranthus rudis
tcaggtaaataagaagtgcacatgattttagtcggtcatcttaatatagtttatcataatttgaaaccaaagaactataaatctttgacccactaaacaagggacatggcctataccacttacgacccatgaaagagagctcgggcatttgattgctaccagctcaccgatttcagcccgattaacaactaaattttttt

SEQ ID NO: 2419 - DNA, 200 bp, Amaranthus rudis
tcatgtgcacttcttatttacctgaagttgctgatgatctttgcttactaagggtcaatcaaaaacaacatttttgttatcaactaaaaggggaagttgtgtacatctgacccttcaaaccccgcttagatgagagccacttaatgtcaataatggcaataggatgtaataagtggtatagactacatagtaataacttt

SEQ ID NO: 2420 - DNA, 200 bp, Amaranthus rudis
aaagttattactatgtagtctataccacttattacatcctattgccattattgacattaagtggctctcatctaagcggggtttgaagggtcagatgtacacaacttccccttttagttgataacaaaaatgttgtttttgattgacccttagtaagcaaagatcatcagcaacttcaggtaaataagaagtgcacatga

SEQ ID NO: 2421 - DNA, 200 bp, Amaranthus rudis
gtatagactacatagtaataactttatggttttaagatgcaaagtatccttatcactccaatatgtgctaagaggctcaaaacagaagtggacgagaaaattatgacattaaaagtatacacaattttagatccgcgtttatgacaaactacttgattgattcttgtatttctgaaagcccagttcaatctcctttgtaa

SEQ ID NO: 2422 - DNA, 200 bp, Amaranthus rudis
ttacaaaggagattgaactgggctttcagaaatacaagaatcaatcaagtagtttgtcataaacgcggatctaaaattgtgtatacttttaatgtcataattttctcgtccacttctgttttgagcctcttagcacatattggagtgataaggatactttgcatcttaaaaccataaagttattactatgtagtctatac

SEQ ID NO: 2423 - DNA, 200 bp, Amaranthus rudis
aagcccagttcaatctcctttgtaatatgttgatgctcgttaagttacctattttctttgtaatgcgtaagccatgaagtttgaggtgttatcttagtccaacaacacatcatgctgtttatttataagtattatgaagtactatgaatgaaagcagggtgaactcaggcccggggctgcctaggccatggcccgagtca

SEQ ID NO: 2424 - DNA, 200 bp, Amaranthus rudis
tgactcgggccatggcctaggcagccccgggcctgagttcaccctgctttcattcatagtacttcataatacttataaataaacagcatgatgtgttgttggactaagataacacctcaaacttcatggcttacgcattacaaagaaaataggtaacttaacgagcatcaacatattacaaaggagattgaactgggctt

SEQ ID NO: 2425 - DNA, 200 bp, Amaranthus rudis
gctgcctaggccatggcccgagtcatttgattaaaaacgcttacaacacagaaaaatagtagtcgggttggttcaacattcatgcaataattccaagatatgataatctaacttcagaatggttgctgctgcagattcaggaccttacgcaccagccattttcagagcgagagcttatgttgatcaaaatagctgcaaat

SEQ ID NO: 2426 - DNA, 200 bp, Amaranthus rudis
atttgcagctattttgatcaacataagctctcgctctgaaaatggctggtgcgtaaggtcctgaatctgcagcagcaaccattctgaagttagattatcatatcttggaattattgcatgaatgttgaaccaacccgactactatttttctgtgttgtaagcgtttttaatcaaatgactcgggccatggcctaggcagc

SEQ ID NO: 2427 - DNA, 200 bp, Amaranthus rudis
tatgttgatcaaaatagctgcaaatactacagccaggagagatgttcttgatattgctaatattttccgtgcaaaagctgtggatgtttcggatcacacgataacattacaggtactaagccgtaggcacacaatttttgccatgttccttgttttttcctaatatttccgacttggtcttttccagctcgccaatatgt

SEQ ID NO: 2428 - DNA, 200 bp, Amaranthus rudis
acatattggcgagctggaaaagaccaagtcggaaatattaggaaaaaacaaggaacatggcaaaaattgtgtgcctacggcttagtacctgtaatgttatcgtgtgatccgaaacatccacagcttttgcacggaaaatattagcaatatcaagaacatctctcctggctgtagtatttgcagctattttgatcaacata

SEQ ID NO: 2429 - DNA, 200 bp, Amaranthus rudis
atcatccaaggtatttgaaacatacttggagtaatttctttctcttccaacattataatgtcgatttatgtgatttgtgctaaagtgacacttcatgtaccctatcttccatcgacttaatttaaactatcgtgacttcaactcttgtcttcatcgttataacttagcttctacccattccgcgacttcattttcatcta

SEQ ID NO: 2430 - DNA, 200 bp, Amaranthus rudis
tagatgaaaatgaagtcgcggaatgggtagaagctaagttataacgatgaagacaagagttgaagtcacgatagtttaaattaagtcgatggaagatagggtacatgaagtgtcactttagcacaaatcacataaatcgacattataatgttggaagagaaagaaattactccaagtatgtttcaaataccttggatgat

SEQ ID NO: 2431 - DNA, 200 bp, Amaranthus rudis
cattccgcgacttcattttcatctaccttgatataccttgatatagcttatcattaatatttttctcataataattcaaaagtttgcatctatctaattttagtgctacaagtgttgcttgtagtaattctgtcttgttagattgtggtgtgtgaactatgtatttttcgtgaattgttgcatttcttgaatgacttgtc

SEQ ID NO: 2432 - DNA, 200 bp, Amaranthus rudis
gacaagtcattcaagaaatgcaacaattcacgaaaaatacatagttcacacaccacaatctaacaagacagaattactacaagcaacacttgtagcactaaaattagatagatgcaaacttttgaattattatgagaaaaatattaatgataagctatatcaaggtatatcaaggtagatgaaaatgaagtcgcggaatg

SEQ ID NO: 2433 - DNA, 200 bp, Amaranthus rudis
tgttgcatttcttgaatgacttgtctctagaatgatgctccttaaacttacttcttttgtttcatgtatgtttaagggagagacgacatacaatatcagtatttgtgggggatgaaagtggaatgattaatcgaatagcaggggtttttgccagaagaggttataatatcgaatcactcgctgttggattgaacaaggac

SEQ ID NO: 2434 - DNA, 200 bp, Amaranthus rudis
gtccttgttcaatccaacagcgagtgattcgatattataacctcttctggcaaaaacccctgctattcgattaatcattccactttcatcccccacaaatactgatattgtatgtcgtctctcccttaaacatacatgaaacaaaagaagtaagtttaaggagcatcattctagagacaagtcattcaagaaatgcaaca

SEQ ID NO: 2435 - DNA, 200 bp, Amaranthus rudis
actcgctgttggattgaacaaggacaaagctctcttcactattgtagtttctggaacggataatgtgttgcagcaagtgatggaacagcttcaaaagcttgtcaatgttttgaaggttattttcctttagaataattaccgtggcatccatgtcttcaattgtttagaattctcatcactaagtacaacttatacatata

SEQ ID NO: 2436 - DNA, 200 bp, Amaranthus rudis
tatatgtataagttgtacttagtgatgagaattctaaacaattgaagacatggatgccacggtaattattctaaaggaaaataaccttcaaaacattgacaagcttttgaagctgttccatcacttgctgcaacacattatccgttccagaaactacaatagtgaagagagctttgtccttgttcaatccaacagcgagt

SEQ ID NO: 2437 - DNA, 200 bp, Amaranthus rudis
tcactaagtacaacttatacatataggttgaagatatatccaaggagcctcaagtagaacgtgaattgatgcttgtaaaagttggagctgatcggaataaccgtgctgaggtacctaataatatatgtcacagtacccaactgtacaaaatagttgatcttattagatacagacagatatattagctagatctctatgtt

SEQ ID NO: 2438 - DNA, 200 bp, Amaranthus rudis
aacatagagatctagctaatatatctgtctgtatctaataagatcaactattttgtacagttgggtactgtgacatatattattaggtacctcagcacggttattccgatcagctccaacttttacaagcatcaattcacgttctacttgaggctccttggatatatcttcaacctatatgtataagttgtacttagtga

SEQ ID NO: 2439 - DNA, 200 bp, Amaranthus rudis
gatatattagctagatctctatgttttttgtggtgactattgactttctgctacatgctgatctttcttagttttctcctagtaaattgtaatttttaatatataatttgttattccactatgtctgttcctgatttactttcactgatcatattgttcgtgtttcttctattgtagctgatgtggttggtggacatctt

SEQ ID NO: 2440 - DNA, 200 bp, Amaranthus rudis
aagatgtccaccaaccacatcagctacaatagaagaaacacgaacaatatgatcagtgaaagtaaatcaggaacagacatagtggaataacaaattatatattaaaaattacaatttactaggagaaaactaagaaagatcagcatgtagcagaaagtcaatagtcaccacaaaaaacatagagatctagctaatatatc

SEQ ID NO: 2441 - DNA, 200 bp, Amaranthus rudis
ctttctagtctcttcccccctcccacccttcaatagcttatcctttcatgccgtccaacaaaatttgaactcatatccttgtgtatgatcggagaaagtaatgattgaatcattaatgatgctcatccttggtgaatttatctctttttatccagtctttgagtctcctggttcaggaacgctgcctattaatcattcca

SEQ ID NO: 2442 - DNA, 200 bp, Amaranthus rudis
tggaatgattaataggcagcgttcctgaaccaggagactcaaagactggataaaaagagataaattcaccaaggatgagcatcattaatgattcaatcattactttctccgatcatacacaaggatatgagttcaaattttgttggacggcatgaaaggataagctattgaagggtgggaggggggaagagactagaaag

SEQ ID NO: 2443 - DNA, 200 bp, Amaranthus rudis
ggaacgctgcctattaatcattccaaatctcttgaataaaagtcattttaaaattatcatatgtatatcattccgtgctgttatttttcttacatgtattttgctatcattagcgtgataaaaaaatgtattttcattcatttccagggtgatgcgccacacaatttctgtctttgttggggatgaaagtggtataatca

SEQ ID NO: 2444 - DNA, 200 bp, Amaranthus rudis
tgattataccactttcatccccaacaaagacagaaattgtgtggcgcatcaccctggaaatgaatgaaaatacatttttttatcacgctaatgatagcaaaatacatgtaagaaaaataacagcacggaatgatatacatatgataattttaaaatgacttttattcaagagatttggaatgattaataggcagcgttcc

SEQ ID NO: 2445 - DNA, 200 bp, Amaranthus rudis
gttggggatgaaagtggtataatcaataggattgccggcgttatttctaggagaggatacaacatagagtctctggctgttggtttaaataaggataaggctctttttactatagtagtgtgtgggaatgacaaggtgttgcgccaagtaatggagcagctcagcaagcttgttagtgtcttaaaggtagacatcacctt

SEQ ID NO: 2446 - DNA, 200 bp, Amaranthus rudis
aaggtgatgtctacctttaagacactaacaagcttgctgagctgctccattacttggcgcaacaccttgtcattcccacacactactatagtaaaaagagccttatccttatttaaaccaacagccagagactctatgttgtatcctctcctagaaataacgccggcaatcctattgattataccactttcatccccaac

SEQ ID NO: 2447 - DNA, 200 bp, Amaranthus rudis
gtgtcttaaaggtagacatcaccttttttcttcctttaaagtttaaggtaactagtgatactttcatttagtaggggcggtcaatggtgatattgatgctaaccatgtatgttcattttgtttatgaaatattgctcattttgactttatcattgttgttaaactctgagaaaatgtaatctctaaagcatctatcctca

SEQ ID NO: 2448 - DNA, 200 bp, Amaranthus rudis
tgaggatagatgctttagagattacattttctcagagtttaacaacaatgataaagtcaaaatgagcaatatttcataaacaaaatgaacatacatggttagcatcaatatcaccattgaccgcccctactaaatgaaagtatcactagttaccttaaactttaaaggaagaaaaaaggtgatgtctacctttaagacac

SEQ ID NO: 2449 - DNA, 200 bp, Amaranthus rudis
gtaatctctaaagcatctatcctcactttaagatagatagagcagggaaacactcatgattcttttaataaactttcaaaatattaaaattccctttccctaatgcagttttatagctcccagctaatctgagttcaaggggtttgagtgtatgcaagcatactcgtataacaacaaaatggttgtctcggattgaccct

SEQ ID NO: 2450 - DNA, 200 bp, Amaranthus rudis
agggtcaatccgagacaaccattttgttgttatacgagtatgcttgcatacactcaaaccccttgaactcagattagctgggagctataaaactgcattagggaaagggaattttaatattttgaaagtttattaaaagaatcatgagtgtttccctgctctatctatcttaaagtgaggatagatgctttagagattac

SEQ ID NO: 2451 - DNA, 200 bp, Amaranthus rudis
ggtataatcaataggattgccggcgttatttctaggagaggatacaacatagagtctctggctgttggtttaaacaaggataaggctctttttactatagtagtgtgtggaactgacaaggtgttgcgccaagtcgtggaacagcttaacaagcttgttagtgtcttgaaggttgaagatctatcagagagccacaagtg

SEQ ID NO: 2452 - DNA, 200 bp, Amaranthus rudis
cacttgtggctctctgatagatcttcaaccttcaagacactaacaagcttgttaagctgttccacgacttggcgcaacaccttgtcagttccacacactactatagtaaaaagagccttatccttgtttaaaccaacagccagagactctatgttgtatcctctcctagaaataacgccggcaatcctattgattatacc

SEQ ID NO: 2453 - DNA, 200 bp, Amaranthus rudis
aagatctatcagagagccacaagtggaacgtgaactgatgcttttaaagcttaattctgatgcaaattcccacgcagagctaatgtggctagtggacatcttcagggcaaaaattgtggatatctcagaaagcttggtcactgttgaggtgaccggagatcctggaaagttggctgctgtcctaagaaattttagaaagt

SEQ ID NO: 2454 - DNA, 200 bp, Amaranthus rudis
actttctaaaatttcttaggacagcagccaactttccaggatctccggtcacctcaacagtgaccaagctttctgagatatccacaatttttgccctgaagatgtccactagccacattagctctgcgtgggaatttgcatcagaattaagctttaaaagcatcagttcacgttccacttgtggctctctgatagatctt

SEQ ID NO: 2455 - DNA, 200 bp, Amaranthus rudis
gctgtcctaagaaattttagaaagtttggaatcaaagaaattgcaaggaccggtaagattgctctaaggcgagaaaagatgggtcagacagctcctttttggagattctctgctgcttcttatccagatctacaagaaaaggctgttgatgctcttgccaggcctatgaaacggagcgtcaatggtgattctggctcatc

SEQ ID NO: 2456 - DNA, 200 bp, Amaranthus rudis
gatgagccagaatcaccattgacgctccgtttcataggcctggcaagagcatcaacagccttttcttgtagatctggataagaagcagcagagaatctccaaaaaggagctgtctgacccatcttttctcgccttagagcaatcttaccggtccttgcaatttctttgattccaaactttctaaaatttcttaggacagc

SEQ ID NO: 2457 - DNA, 200 bp, Amaranthus rudis
gcgtcaatggtgattctggctcatcttcaagtggtgatgtttatccggtggaaccttatgatgtttcgatggtaaatcaagtacttgatgctcactggggcgtactttatgacggtgattcaagtggtctccggtcacatacgctgtccatgctggtaaataatgctcccggagttcttaacactgttacaggagtaatt

SEQ ID NO: 2458 - DNA, 200 bp, Amaranthus rudis
aattactcctgtaacagtgttaagaactccgggagcattatttaccagcatggacagcgtatgtgaccggagaccacttgaatcaccgtcataaagtacgccccagtgagcatcaagtacttgatttaccatcgaaacatcataaggttccaccggataaacatcaccacttgaagatgagccagaatcaccattgacgc

SEQ ID NO: 2459 - DNA, 200 bp, Amaranthus rudis
tcttaacactgttacaggagtaatttctcgtaggggttataacattcagagtcttgctgtaggccctgctgaaaaggagggtctttctcgtatcacaactgtcattcctggaaacgatgagtcgattggaaaattggttcagcaatttaacaagttagtagaccttcatgagattcaggaccttacgcaccagccatttt

SEQ ID NO: 2460 - DNA, 200 bp, Amaranthus rudis
aaaatggctggtgcgtaaggtcctgaatctcatgaaggtctactaacttgttaaattgctgaaccaattttccaatcgactcatcgtttccaggaatgacagttgtgatacgagaaagaccctccttttcagcagggcctacagcaagactctgaatgttataacccctacgagaaattactcctgtaacagtgttaaga

SEQ ID NO: 2461 - DNA, 200 bp, Amaranthus rudis
caggaccttacgcaccagccattttcagagcgagagcttatgttgatcaaaatagctgcaaatactacagccaggagagatgttcttgatattgctaatattttccgtgcaaaagctgtggatgtttcggatcacacgataacattacagcttacgggtgatttacacaaaatggttgcgctacaaagattattggagcc

SEQ ID NO: 2462 - DNA, 200 bp, Amaranthus rudis
ggctccaataatctttgtagcgcaaccattttgtgtaaatcacccgtaagctgtaatgttatcgtgtgatccgaaacatccacagcttttgcacggaaaatattagcaatatcaagaacatctctcctggctgtagtatttgcagctattttgatcaacataagctctcgctctgaaaatggctggtgcgtaaggtcctg

SEQ ID NO: 2463 - DNA, 200 bp, Amaranthus rudis
ttgcgctacaaagattattggagccttatggcatttgtgaggtggcacggacaggaagagtagcactgagtagagagtctggggtcgattctacatctttacgtggatacgctcttccattgtacgaatgaaaaatctccggctatgtctttccgtcaatatcatgtccatttccttcagcacgtctgcactacatttac

SEQ ID NO: 2464 - DNA, 200 bp, Amaranthus rudis
gtaaatgtagtgcagacgtgctgaaggaaatggacatgatattgacggaaagacatagccggagatttttcattcgtacaatggaagagcgtatccacgtaaagatgtagaatcgaccccagactctctactcagtgctactcttcctgtccgtgccacctcacaaatgccataaggctccaataatctttgtagcgcaa

SEQ ID NO: 2465 - DNA, 200 bp, Amaranthus rudis
ttcagcacgtctgcactacatttacatagcgatcaatcgcccgtcaaccagagtgaaggaaagcagtatttctgacctttgctttgaacatgctattttgtataataggaataattttgtattggttatatttgctaatacccagtagtaatattgttacctcgagttcgaatatctgaaacatactttttctcttgaat

SEQ ID NO: 2466 - DNA, 200 bp, Amaranthus rudis
attcaagagaaaaagtatgtttcagatattcgaactcgaggtaacaatattactactgggtattagcaaatataaccaatacaaaattattcctattatacaaaatagcatgttcaaagcaaaggtcagaaatactgctttccttcactctggttgacgggcgattgatcgctatgtaaatgtagtgcagacgtgctgaa

SEQ ID NO: 2467 - DNA, 200 bp, Amaranthus rudis; identical to SEQ ID NO: 2451

SEQ ID NO: 2468 - DNA, 200 bp, Amaranthus rudis; identical to SEQ ID NO: 2452

SEQ ID NO: 2469 - DNA, 200 bp, Amaranthus rudis
gtatctgcaagcaatgttgatcaactgggaaatcaaagtaacttatcctttaatcccctttctccctctcgatcaaagtatgttatttttcccttttttgattaatttcacaatgttagaatctgggtttggcttgttgttttaatttctactagttaattttgtttttcattatgttataaaatttttaaatgaaaatg

SEQ ID NO: 2470 - DNA, 200 bp, Amaranthus rudis
cattttcatttaaaaattttataacataatgaaaaacaaaattaactagtagaaattaaaacaacaagccaaacccagattctaacattgtgaaattaatcaaaaaagggaaaaataacatactttgatcgagagggagaaaggggattaaaggataagttactttgatttcccagttgatcaacattgcttgcagatac

SEQ ID NO: 2471 - DNA, 200 bp, Amaranthus rudis
gttataaaatttttaaatgaaaatgagtaatcatttaatttatgaacaattgttgtcactcgtgctagcctgaaggattgggaaaattagtcaattatgaatctggtatatttttcattgatttgtgtgttttgttgcatcttgcatgtagtttgttcatccatttgatttttatacaagagagcgtgcaaaatttagca

SEQ ID NO: 2472 - DNA, 200 bp, Amaranthus rudis
tgctaaattttgcacgctctcttgtataaaaatcaaatggatgaacaaactacatgcaagatgcaacaaaacacacaaatcaatgaaaaatataccagattcataattgactaattttcccaatccttcaggctagcacgagtgacaacaattgttcataaattaaatgattactcattttcatttaaaaattttataac

SEQ ID NO: 2473 - DNA, 200 bp, Amaranthus rudis
acaagagagcgtgcaaaatttagcatgttttcagttcttaaattgatcactgcctgtattttattagcgtaccccattaaaacgactcattaaatcactttttttatttgggtgaagatgtttaagatctttgctacaaagatttgatcggaaacagtctctttgttattatcactaataagggtaagattgtatacatt

SEQ ID NO: 2474 - DNA, 200 bp, Amaranthus rudis
aatgtatacaatcttacccttattagtgataataacaaagagactgtttccgatcaaatctttgtagcaaagatcttaaacatcttcacccaaataaaaaaagtgatttaatgagtcgttttaatggggtacgctaataaaatacaggcagtgatcaatttaagaactgaaaacatgctaaattttgcacgctctcttgt

SEQ ID NO: 2475 - DNA, 200 bp, Amaranthus rudis
taataagggtaagattgtatacattagactccaaaccgcacctaggtctgggggcactaaatagcattggggtaatgaaatgttgttggtgtatttttgtaatgaataccaaacaagctgttaagtatagatactttccctgcaataatacaagagtttatgaggctcttgttcaaaccagcacaagtttattgaaagat

SEQ ID NO: 2476 - DNA, 200 bp, Amaranthus rudis
atctttcaataaacttgtgctggtttgaacaagagcctcataaactcttgtattattgcagggaaagtatctatacttaacagcttgtttggtattcattacaaaaatacaccaacaacatttcattaccccaatgctatttagtgcccccagacctaggtgcggtttggagtctaatgtatacaatcttacccttatta

SEQ ID NO: 2477 - DNA, 200 bp, Amaranthus rudis
aaccagcacaagtttattgaaagatttatcagtagtttttttgtgattcataatcttttaagtaccaagcaaagctctttatgacatggaaacccgctgcaatctaattgacctagtgctaaaagctgcttgatttgcttattgccttaagtgaaaatttatagcaagcgttttggaggaagaaaagcaaaagatcgata

SEQ ID NO: 2478 - DNA, 200 bp, Amaranthus rudis
tatcgatcttttgcttttcttcctccaaaacgcttgctataaattttcacttaaggcaataagcaaatcaagcagcttttagcactaggtcaattagattgcagcgggtttccatgtcataaagagctttgcttggtacttaaaagattatgaatcacaaaaaaactactgataaatctttcaataaacttgtgctggtt

SEQ ID NO: 2479 - DNA, 200 bp, Amaranthus rudis
gaggaagaaaagcaaaagatcgatatgctttcatgtcttcagaaaattagttccgaagttgtggagtataatagagttcaattattgtttgcatttagatctaccttgatttgatatacaacaacaatgtcatatccttattcctaaaagattaaattctactacatgaaccaatatgctatcattttgagtaattgtcc

SEQ ID NO: 2480 - DNA, 200 bp, Amaranthus rudis
ggacaattactcaaaatgatagcatattggttcatgtagtagaatttaatcttttaggaataaggatatgacattgttgttgtatatcaaatcaaggtagatctaaatgcaaacaataattgaactctattatactccacaacttcggaactaattttctgaagacatgaaagcatatcgatcttttgcttttcttcctc

SEQ ID NO: 2481 - DNA, 200 bp, Amaranthus rudis
atgctatcattttgagtaattgtccttctctattcatttcgattttctaccactcaacttataagtctaaatctttcatatgcttttccactcctggtcatctttgctcttcctcaccttctttttaagtcttccgatttgctactttctatccttcttatcggttcacttataccacatctttgcatatgcctaaacaa

SEQ ID NO: 2482 - DNA, 200 bp, Amaranthus rudis
ttgtttaggcatatgcaaagatgtggtataagtgaaccgataagaaggatagaaagtagcaaatcggaagacttaaaaagaaggtgaggaagagcaaagatgaccaggagtggaaaagcatatgaaagatttagacttataagttgagtggtagaaaatcgaaatgaatagagaaggacaattactcaaaatgatagcat

SEQ ID NO: 2483 - DNA, 200 bp, Amaranthus rudis
cacatctttgcatatgcctaaacaatctttaacaattctctagcgttgttttctcaaaatttgcgactttcaagcctttttttacatattttttttcgaattctatcactcaaggtataccgctcatccaccaaagcattcgcctttctggtacttctatctttctactatgatcctttctaaaagcccgcgttcagatg

SEQ ID NO: 2484 - DNA, 200 bp, Amaranthus rudis
catctgaacgcgggcttttagaaaggatcatagtagaaagatagaagtaccagaaaggcgaatgctttggtggatgagcggtataccttgagtgatagaattcgaaaaaaaatatgtaaaaaaaggcttgaaagtcgcaaattttgagaaaacaacgctagagaattgttaaagattgtttaggcatatgcaaagatgtg

SEQ ID NO: 2485 - DNA, 200 bp, Amaranthus rudis
ctttctaaaagcccgcgttcagatgtatatagtagcgttgatctaatggtgtaaaacttaccttttagctttagggtcacacctcgatcacctaatgtcctagtcgttcttcttttgccaccgacactttatttattgtgtcacatcttgttggatattaccataactctagaatcatacccaaggtatttgaaacatct

SEQ ID NO: 2486 - DNA, 200 bp, Amaranthus rudis
agatgtttcaaataccttgggtatgattctagagttatggtaatatccaacaagatgtgacacaataaataaagtgtcggtggcaaaagaagaacgactaggacattaggtgatcgaggtgtgaccctaaagctaaaaggtaagttttacaccattagatcaacgctactatatacatctgaacgcgggcttttagaaag

SEQ ID NO: 2487 - DNA, 200 bp, Amaranthus rudis
catacccaaggtatttgaaacatctacttggagtaatttctttctcttccaacattataatgtcgatttatgtgatttgtgctaaagtgacacttcatgtaccctatcttccatcgacttaatttaaactatcgtgacttcaactcttgtcttcatcgttataacttagcttctacccattccgcgacttcattttcatc

SEQ ID NO: 2488 - DNA, 200 bp, Amaranthus rudis
gatgaaaatgaagtcgcggaatgggtagaagctaagttataacgatgaagacaagagttgaagtcacgatagtttaaattaagtcgatggaagatagggtacatgaagtgtcactttagcacaaatcacataaatcgacattataatgttggaagagaaagaaattactccaagtagatgtttcaaataccttgggtatg

SEQ ID NO: 2489 - DNA, 200 bp, Amaranthus rudis
cccattccgcgacttcattttcatctaccttgatataccttgatatagcttatcattaatatttttctcataataattcaaaagtttgcatctatctaattttagtgctacaagtgttgcttgtagtaattctgtcttgttagattgtggtgtgtgaactatgtatttttcgtgaattgttgcatttcttgaatgacttg

SEQ ID NO: 2490 - DNA, 200 bp, Amaranthus rudis
caagtcattcaagaaatgcaacaattcacgaaaaatacatagttcacacaccacaatctaacaagacagaattactacaagcaacacttgtagcactaaaattagatagatgcaaacttttgaattattatgagaaaaatattaatgataagctatatcaaggtatatcaaggtagatgaaaatgaagtcgcggaatggg

SEQ ID NO: 2491 - DNA, 200 bp, Amaranthus rudis
attgttgcatttcttgaatgacttgtctctagaatgatgctccttaaacttacttcttttgtttcatgtatgtttaagggagagacgacatacaatatcagtatttgtgggggatgaaagtggaatgattaatcgaatagcaggggtctttgccagaagaggttataacatcgaatcactcgctgttggattgaacaagg

SEQ ID NO: 2492 - DNA, 200 bp, Amaranthus rudis
ccttgttcaatccaacagcgagtgattcgatgttataacctcttctggcaaagacccctgctattcgattaatcattccactttcatcccccacaaatactgatattgtatgtcgtctctcccttaaacatacatgaaacaaaagaagtaagtttaaggagcatcattctagagacaagtcattcaagaaatgcaacaat

SEQ ID NO: 2493 - DNA, 200 bp, Amaranthus rudis
tcactcgctgttggattgaacaaggacaaagctctcttcactattgtagtttctggaacggataatgtgttgcagcaagtgatggaacagcttcaaaagcttgtcaatgttttgaaggttattttcctttagaataattgccgtggcatccatgtcttcaattgtttagaattctcatcactaagtacaacttatacata

SEQ ID NO: 2494 - DNA, 200 bp, Amaranthus rudis
tatgtataagttgtacttagtgatgagaattctaaacaattgaagacatggatgccacggcaattattctaaaggaaaataaccttcaaaacattgacaagcttttgaagctgttccatcacttgctgcaacacattatccgttccagaaactacaatagtgaagagagctttgtccttgttcaatccaacagcgagtga

SEQ ID NO: 2495 - DNA, 200 bp, Amaranthus rudis
catcactaagtacaacttatacatataggttgaagatatatccaaggagcctcaagtagaacgtgaattgatgcttgtaaaagttggagctgatcggaataaccgtgctgaggtacctaataatatatgtcacagtacccaactgtacaaaatagttgatcttattagatacagacagatatattagctagatctctatg

SEQ ID NO: 2496 - DNA, 200 bp, Amaranthus rudis
catagagatctagctaatatatctgtctgtatctaataagatcaactattttgtacagttgggtactgtgacatatattattaggtacctcagcacggttattccgatcagctccaacttttacaagcatcaattcacgttctacttgaggctccttggatatatcttcaacctatatgtataagttgtacttagtgatg

SEQ ID NO: 2497 - DNA, 200 bp, Amaranthus rudis
cagatatattagctagatctctatgttttttgtggtgactattgactttctgctacatgctgatctttcttagttttctcctagtaaattgtaatttttaatatataatttgttattccactatgtctgttcctgatttactttcactgatcatattgttcgtgtttcttctattgtagctgatgtggttggtggacatc

SEQ ID NO: 2498 - DNA, 200 bp, Amaranthus rudis
gatgtccaccaaccacatcagctacaatagaagaaacacgaacaatatgatcagtgaaagtaaatcaggaacagacatagtggaataacaaattatatattaaaaattacaatttactaggagaaaactaagaaagatcagcatgtagcagaaagtcaatagtcaccacaaaaaacatagagatctagctaatatatctg

SEQ ID NO: 2499 - DNA, 200 bp, Amaranthus rudis
gtagctgatgtggttggtggacatctttcgtgccaaaattgtggacatatcggaagattatctttcaatagaggtaatcacaggatatttcataaaatcaatgttggttttgggaatattgtgactgcagttttacttagacaagtatcaatgtttcaggatgttctacaggttaagtgtttaatgtacattttcaacaa

SEQ ID NO: 2500 - DNA, 200 bp, Amaranthus rudis
ttgttgaaaatgtacattaaacacttaacctgtagaacatcctgaaacattgatacttgtctaagtaaaactgcagtcacaatattcccaaaaccaacattgattttatgaaatatcctgtgattacctctattgaaagataatcttccgatatgtccacaattttggcacgaaagatgtccaccaaccacatcagctac

SEQ ID NO: 2501 - DNA, 200 bp, Amaranthus rudis
agtgtttaatgtacattttcaacaagctacttgatgcacttctctgatgacgtgtaaaattgtaatgtacatattgcacactgaattgaaaattttggaagaagggacattaaaatgatttatgacctaatattgctgtatatatacatgcttatatttcttcaagcagcttaagaaaatttattatattgtttttcctc

SEQ ID NO: 2502 - DNA, 200 bp, Amaranthus rudis
gaggaaaaacaatataataaattttcttaagctgcttgaagaaatataagcatgtatatatacagcaatattaggtcataaatcattttaatgtcccttcttccaaaattttcaattcagtgtgcaatatgtacattacaattttacacgtcatcagagaagtgcatcaagtagcttgttgaaaatgtacattaaacact

SEQ ID NO: 2503 - DNA, 200 bp, Amaranthus rudis
aaaatttattatattgtttttcctcctttagtgaaaaaagttcagtgagataaaagtttcatctttcatgtttagtaaacaagtttagtgaagactgaagagaacaaaatttgtactttttaatggttttatattttttgttaattttgtaagctaatatggaaactataagactgtagttgtttttgtttagctctttt

SEQ ID NO: 2504 - DNA, 200 bp, Amaranthus rudis
aaaagagctaaacaaaaacaactacagtcttatagtttccatattagcttacaaaattaacaaaaaatataaaaccattaaaaagtacaaattttgttctcttcagtcttcactaaacttgtttactaaacatgaaagatgaaacttttatctcactgaacttttttcactaaaggaggaaaaacaatataataaatttt

SEQ ID NO: 2505 - DNA, 200 bp, Amaranthus rudis
gtagttgtttttgtttagctcttttcacttttacgtttgagttgtttttcaatgatcacatgcttaataaagtaatttacctagcaccttgaatatccaggtcactggagatccaggaaagatggttgctgtccttagaaacctaagcaagtttggcattaaagaaattgctcgtaccggaaaggtttatttttattttt

SEQ ID NO: 2506 - DNA, 200 bp, Amaranthus rudis
aaaaataaaaataaacctttccggtacgagcaatttctttaatgccaaacttgcttaggtttctaaggacagcaaccatctttcctggatctccagtgacctggatattcaaggtgctaggtaaattactttattaagcatgtgatcattgaaaaacaactcaaacgtaaaagtgaaaagagctaaacaaaaacaactac

SEQ ID NO: 2507 - DNA, 200 bp, Amaranthus rudis
accggaaaggtttatttttattttttttgagaattttttttatctttgtttaagagctctttaagtttccatattacataataaatctgaatgtcttagatataaaacttttgtttattgtttgtccagggtttatatatttttaatatgaagtaaagtttaatttctaacagattgctctaagaagggaaaaattgggt

SEQ ID NO: 2508 - DNA, 200 bp, Amaranthus rudis
acccaatttttcccttcttagagcaatctgttagaaattaaactttacttcatattaaaaatatataaaccctggacaaacaataaacaaaagttttatatctaagacattcagatttattatgtaatatggaaacttaaagagctcttaaacaaagataaaaaaaattctcaaaaaaaataaaaataaacctttccggt

SEQ ID NO: 2509 - DNA, 200 bp, Amaranthus rudis
tgctctaagaagggaaaaattgggtgagtctgctcctttctggcgtttttctgctgcttcttatcctgatcttgaagaagctatccctatggatgctctttctggagtttccaaaagagcagctgctgctggatcatcagattcgtctgtggaggtgtgtttcttatttgttcattgctcacattcctaatattttgaga

SEQ ID NO: 2510 - DNA, 200 bp, Amaranthus rudis
tctcaaaatattaggaatgtgagcaatgaacaaataagaaacacacctccacagacgaatctgatgatccagcagcagctgctcttttggaaactccagaaagagcatccatagggatagcttcttcaagatcaggataagaagcagcagaaaaacgccagaaaggagcagactcacccaatttttcccttcttagagca

SEQ ID NO: 2511 - DNA, 200 bp, Amaranthus rudis
tgctcacattcctaatattttgagagttgaatccacacatttctttcttgttgtacaattctttttgtttcttgtttccatctgcccatttacatgattgcatctttaattatattattattgctttcactaaatggaacaccttgatgttgtgctttccaaaacgaacgtttttattcaaatccattcctcaataccag

SEQ ID NO: 2512 - DNA, 200 bp, Amaranthus rudis
ctggtattgaggaatggatttgaataaaaacgttcgttttggaaagcacaacatcaaggtgttccatttagtgaaagcaataataatataattaaagatgcaatcatgtaaatgggcagatggaaacaagaaacaaaaagaattgtacaacaagaaagaaatgtgtggattcaactctcaaaatattaggaatgtgagca

SEQ ID NO: 2513 - DNA, 200 bp, Amaranthus rudis
attcaaatccattcctcaataccagtaataaaccggattaaaagtgaaccactattatgggaggttttagggtatattatggattccgattaaaacatagttaaatcctaaaaggtagtaattggctatgttatctggactcgggaactcatgtgatatgtgtcggagtgtctgattcggctaagttaaggaaaaataca

SEQ ID NO: 2514 - DNA, 200 bp, Amaranthus rudis
tgtatttttccttaacttagccgaatcagacactccgacacatatcacatgagttcccgagtccagataacatagccaattactaccttttaggatttaactatgttttaatcggaatccataatataccctaaaacctcccataatagtggttcacttttaatccggtttattactggtattgaggaatggatttgaat

SEQ ID NO: 2515 - DNA, 200 bp, Amaranthus rudis
ttcggctaagttaaggaaaaatacaataacttttgtccaaaataaagtgtccaagtgtcgtgcccaagtccgaatgttgaggatccgacatgggtacttgagttaaaaattaaaatgaagagttcgggtaacaaatgtaattgattaaaaaacctatagttgccaaatttttaaactttttaaggtagttgggaaaattt

SEQ ID NO: 2516 - DNA, 200 bp, Amaranthus rudis
aaattttcccaactaccttaaaaagtttaaaaatttggcaactataggttttttaatcaattacatttgttacccgaactcttcattttaatttttaactcaagtacccatgtcggatcctcaacattcggacttgggcacgacacttggacactttattttggacaaaagttattgtatttttccttaacttagccgaa

SEQ ID NO: 2517 - DNA, 200 bp, Amaranthus rudis
ctttttaaggtagttgggaaaatttccttttattgaaaaaactttgggaggacaatattttgtgaatgtgtctcgagacatggctcttatgttaaagggcttcaagactaataggtaatggtggatatgtcgaatgcgggtgtgcaggcaggttgcaggtcaaatatttccacagcctgtcgttggtgtgcttttcactt

SEQ ID NO: 2518 - DNA, 200 bp, Amaranthus rudis
aagtgaaaagcacaccaacgacaggctgtggaaatatttgacctgcaacctgcctgcacacccgcattcgacatatccaccattacctattagtcttgaagccctttaacataagagccatgtctcgagacacattcacaaaatattgtcctcccaaagttttttcaataaaaggaaattttcccaactaccttaaaaag

SEQ ID NO: 2519 - DNA, 200 bp, Amaranthus rudis
cctgtcgttggtgtgcttttcacttctagcaatttacagcaaattagtagcaaatttacaacaaatttacagctgattgtaagctcaataacccatcatgacataaatactaaaatataacatatgtttaactacaaaatacaattcagaatcatcaaattacaatttagctgtttcatatacatacactaaatatttct

SEQ ID NO: 2520 - DNA, 200 bp, Amaranthus rudis
agaaatatttagtgtatgtatatgaaacagctaaattgtaatttgatgattctgaattgtattttgtagttaaacatatgttatattttagtatttatgtcatgatgggttattgagcttacaatcagctgtaaatttgttgtaaatttgctactaatttgctgtaaattgctagaagtgaaaagcacaccaacgacagg

SEQ ID NO: 2521 - DNA, 200 bp, Amaranthus rudis
tcatatacatacactaaatatttctgtgacccaacttcaattcaatctcttagtatcataaatttaacaatcaaacacaacaaaagtataaagttagaatgggagtactgcatgtggattgtctctcagctaaagtcctgcagcagctttgcacattatctggtgagacattggatatgagtgagagctttgggataaat

SEQ ID NO: 2522 - DNA, 200 bp, Amaranthus rudis
atttatcccaaagctctcactcatatccaatgtctcaccagataatgtgcaaagctgctgcaggactttagctgagagacaatccacatgcagtactcccattctaactttatacttttgttgtgtttgattgttaaatttatgatactaagagattgaattgaagttgggtcacagaaatatttagtgtatgtatatga

SEQ ID NO: 2523 - DNA, 200 bp, Amaranthus rudis
tatgagtgagagctttgggataaatatgcacagaaatacttctcttcttgccatgcccaggctcatactgcagcttcaggaaaatgaaggtcctgtatgatttttagaaactccaccaaattctgaagattaaactcacctcgctaagcaacattgagatatcttcagtatattcgcacctatctgatacctcactatga

SEQ ID NO: 2524 - DNA, 200 bp, Amaranthus rudis
tcatagtgaggtatcagataggtgcgaatatactgaagatatctcaatgttgcttagcgaggtgagtttaatcttcagaatttggtggagtttctaaaaatcatacaggaccttcattttcctgaagctgcagtatgagcctgggcatggcaagaagagaagtatttctgtgcatatttatcccaaagctctcactcata

SEQ ID NO: 2525 - DNA, 200 bp, Amaranthus rudis
gcacctatctgatacctcactatgagatctctataaattcagcttcactaagacaagcccaaaatgaaatttctaactaatagccattttcagcaactttttatgcagattccaaactatccattatccataaacttaaatatatcccatttttatgacatttttgatgcctcttgtatgctaattttttctaactatat

SEQ ID NO: 2526 - DNA, 200 bp, Amaranthus rudis
atatagttagaaaaaattagcatacaagaggcatcaaaaatgtcataaaaatgggatatatttaagtttatggataatggatagtttggaatctgcataaaaagttgctgaaaatggctattagttagaaatttcattttgggcttgtcttagtgaagctgaatttatagagatctcatagtgaggtatcagataggtgc

SEQ ID NO: 2527 - DNA, 200 bp, Amaranthus rudis
gtatgctaattttttctaactatatacactaccacaaaacacaaatctatgcttactctaaataagtttaatatgaactacattttatttttagtgactacggcttagaagtatatcttagaacaacttacattgtagattaatatgacataatcttttatcaatctatacctcctcaggacaagtaagataaaagaact

SEQ ID NO: 2528 - DNA, 200 bp, Amaranthus rudis
agttcttttatcttacttgtcctgaggaggtatagattgataaaagattatgtcatattaatctacaatgtaagttgttctaagatatacttctaagccgtagtcactaaaaataaaatgtagttcatattaaacttatttagagtaagcatagatttgtgttttgtggtagtgtatatagttagaaaaaattagcatac

SEQ ID NO: 2529 - DNA, 200 bp, Amaranthus rudis
tcaggacaagtaagataaaagaactctaatgtacaaaatttaattgatttttttgaaaaaagatacaagaaaatggaagaggcaacacaggcaaagaaggcttctcgatcctctgagcactctaaaccttgcaatactacagtgaactataaaaaaagacaagaaagttcagaaatcatcaaaatattttcccctaaaaa

SEQ ID NO: 2530 - DNA, 200 bp, Amaranthus rudis
tttttaggggaaaatattttgatgatttctgaactttcttgtctttttttatagttcactgtagtattgcaaggtttagagtgctcagaggatcgagaagccttctttgcctgtgttgcctcttccattttcttgtatcttttttcaaaaaaatcaattaaattttgtacattagagttcttttatcttacttgtcctga

SEQ ID NO: 2531 - DNA, 200 bp, Amaranthus rudis
tcatcaaaatattttcccctaaaaaggttcaacatcatcttcttcctcttcttccacaatctcgaatgtcatgttcatctaaaagcctatccctgtcctcaatggtgttgtacatagcaggccttggaggcacactaatgcttgcactgcttttgacttcaaggaactttgagtagcaaaaattgtcttttcaccttggc

SEQ ID NO: 2532 - DNA, 200 bp, Amaranthus rudis
gccaaggtgaaaagacaatttttgctactcaaagttccttgaagtcaaaagcagtgcaagcattagtgtgcctccaaggcctgctatgtacaacaccattgaggacagggataggcttttagatgaacatgacattcgagattgtggaagaagaggaagaagatgatgttgaacctttttaggggaaaatattttgatga

SEQ ID NO: 2533 - DNA, 200 bp, Amaranthus rudis
gcaaaaattgtcttttcaccttggccaaagggagatttgcaagtcacagtactcactggaatgtatataaaataactttaatgataaaagacaatgaaaatgatttttgtgcatttaaaaagatgtttttaagtgactattttttttctagggtttatcttttctattccttctctctcttttaatatgtaaatggaatt

SEQ ID NO: 2534 - DNA, 200 bp, Amaranthus rudis
aattccatttacatattaaaagagagagaaggaatagaaaagataaaccctagaaaaaaaatagtcacttaaaaacatctttttaaatgcacaaaaatcattttcattgtcttttatcattaaagttattttatatacattccagtgagtactgtgacttgcaaatctccctttggccaaggtgaaaagacaatttttgc

SEQ ID NO: 2535 - DNA, 200 bp, Amaranthus rudis
tctcttttaatatgtaaatggaatttacgttataggttgaaggtcttattaatcaggatgacatcttgagcaaattggttcacattctagtctagatgcttcgaggccatggaatggagccatgtcccacagtttctatgtctttaatcctaggggtcacgtgccaatcttttcacctagattatacgcaactaaaattt

SEQ ID NO: 2536 - DNA, 200 bp, Amaranthus rudis
aaattttagttgcgtataatctaggtgaaaagattggcacgtgacccctaggattaaagacatagaaactgtgggacatggctccattccatggcctcgaagcatctagactagaatgtgaaccaatttgctcaagatgtcatcctgattaataagaccttcaacctataacgtaaattccatttacatattaaaagaga

SEQ ID NO: 2537 - DNA, 200 bp, Amaranthus rudis
cctagattatacgcaactaaaatttcctaagagtaagagaaactttagcttcttagtaaatcaaagttatctaaatttgttagattaagagctaatatttcttttagctgtttaacacgttaacctcagttcttttaggtttgagagcaaccttttgcacctaggagtccatgtccttcatttttctgtccatcaggttt

SEQ ID NO: 2538 - DNA, 200 bp, Amaranthus rudis
aaacctgatggacagaaaaatgaaggacatggactcctaggtgcaaaaggttgctctcaaacctaaaagaactgaggttaacgtgttaaacagctaaaagaaatattagctcttaatctaacaaatttagataactttgatttactaagaagctaaagtttctcttactcttaggaaattttagttgcgtataatctagg

SEQ ID NO: 2539 - DNA, 200 bp, Amaranthus rudis
cttcatttttctgtccatcaggtttttattttcaagctcttttgtaaaatctgaatgagcccctagccgcattcatatcaccttacttatggcatcctttagcctaaaatgtttgaagcaatagggaatcctctactttggatagtacaatgttgcacaatctctgcttgcttttatgtgtatgcaattcttaagattag

SEQ ID NO: 2540 - DNA, 200 bp, Amaranthus rudis
ctaatcttaagaattgcatacacataaaagcaagcagagattgtgcaacattgtactatccaaagtagaggattccctattgcttcaaacattttaggctaaaggatgccataagtaaggtgatatgaatgcggctaggggctcattcagattttacaaaagagcttgaaaataaaaacctgatggacagaaaaatgaag

SEQ ID NO: 2541 - DNA, 200 bp, Amaranthus rudis
atgtgtatgcaattcttaagattagaccgtctttttaaagaagaagaaacatttactagcgaagatataaaaaatacagagggtcactgaatctttattagtgggcttttagacaacaaactaagtggacacattaggttaaatgacattctttatgcttagcagatcttagacaattcctattcctaaccaaataacta

SEQ ID NO: 2542 - DNA, 200 bp, Amaranthus rudis
tagttatttggttaggaataggaattgtctaagatctgctaagcataaagaatgtcatttaacctaatgtgtccacttagtttgttgtctaaaagcccactaataaagattcagtgaccctctgtattttttatatcttcgctagtaaatgtttcttcttctttaaaaagacggtctaatcttaagaattgcatacacat

SEQ ID NO: 2543 - DNA, 200 bp, Amaranthus rudis
attcctattcctaaccaaataactatgtcttgagataagagtctatccttaataactaccagattgctgtggtggtacaaagtatcgtgtattaacctgaaacataattggccaccagatcacaaatgaagctcttgtgaaagaaaaggtagatcccattttactcggacccttttcttcctattgcagcttggatcttt

SEQ ID NO: 2544 - DNA, 200 bp, Amaranthus rudis
aaagatccaagctgcaataggaagaaaagggtccgagtaaaatgggatctaccttttctttcacaagagcttcatttgtgatctggtggccaattatgtttcaggttaatacacgatactttgtaccaccacagcaatctggtagttattaaggatagactcttatctcaagacatagttatttggttaggaataggaat

SEQ ID NO: 2545 - DNA, 200 bp, Amaranthus rudis
tcttcctattgcagcttggatctttctgattggaaactctctttgctgctatatgatgttctttaagttctatgggtatcttagctctacaactttatttcctaattcaacaattaccatttcccacctgctccaaatattattacttgaagaattttggctgcttgtataagtatgtttggtccttgaactacattatg

SEQ ID NO: 2546 - DNA, 200 bp, Amaranthus rudis
cataatgtagttcaaggaccaaacatacttatacaagcagccaaaattcttcaagtaataatatttggagcaggtgggaaatggtaattgttgaattaggaaataaagttgtagagctaagatacccatagaacttaaagaacatcatatagcagcaaagagagtttccaatcagaaagatccaagctgcaataggaaga

SEQ ID NO: 2547 - DNA, 200 bp, Amaranthus rudis
tgtttggtccttgaactacattatgtctccccccttcccgagcattttctgttaagggttttacttttctgatgaattatcatgtctgcttcggagttgaactcacatcaatatcttgaagggttttatcctctattttttagggtgatgtttatcccgtggagccgtttgatggtttctcccctccaatcttagatgct

SEQ ID NO: 2548 - DNA, 200 bp, Amaranthus rudis
agcatctaagattggaggggagaaaccatcaaacggctccacgggataaacatcaccctaaaaaatagaggataaaacccttcaagatattgatgtgagttcaactccgaagcagacatgataattcatcagaaaagtaaaacccttaacagaaaatgctcgggaaggggggagacataatgtagttcaaggaccaaaca

SEQ ID NO: 2549 - DNA, 200 bp, Amaranthus rudis
tttctcccctccaatcttagatgctcattggggtattttgaatgaagaagatgtaagctactttcctttctcttttatttctctcgggttgtttattttctagttcaattgtttgccttttgtgttcattttcgatggatacatagttttatcattctccagtttcaaattttaatggatgcaacaaaatgactctttaa

SEQ ID NO: 2550 - DNA, 200 bp, Amaranthus rudis
ttaaagagtcattttgttgcatccattaaaatttgaaactggagaatgataaaactatgtatccatcgaaaatgaacacaaaaggcaaacaattgaactagaaaataaacaacccgagagaaataaaagagaaaggaaagtagcttacatcttcttcattcaaaataccccaatgagcatctaagattggaggggagaaa

SEQ ID NO: 2551 - DNA, 200 bp, Amaranthus rudis
tggatgcaacaaaatgactctttaaattatgtgcacagtttcgatggatacacaattttgttttctctaagtctagggttgtgcatttatgcaaagtttctatttgatgtttgctattaagggtcaattagaaacagtttctttgtttctataaggataaggttgcatatgtgtggctctccaaaccccacgtagatggg

SEQ ID NO: 2552 - DNA, 200 bp, Amaranthus rudis
cccatctacgtggggtttggagagccacacatatgcaaccttatccttatagaaacaaagaaactgtttctaattgacccttaatagcaaacatcaaatagaaactttgcataaatgcacaaccctagacttagagaaaacaaaattgtgtatccatcgaaactgtgcacataatttaaagagtcattttgttgcatcca

SEQ ID NO: 2553 - DNA, 200 bp, Amaranthus rudis
gctctccaaaccccacgtagatgggagattaggtgggagccaatttatagcgttggggcaattgaaagttgttgtctattgtttgctctccaaggattttaattgctcaagtttgtgaatgatgcatttcatagttctcattaagaatttgacttcagagtagaaaactccctcccataaggttctgctatggtttgagt

SEQ ID NO: 2554 - DNA, 200 bp, Amaranthus rudis
actcaaaccatagcagaaccttatgggagggagttttctactctgaagtcaaattcttaatgagaactatgaaatgcatcattcacaaacttgagcaattaaaatccttggagagcaaacaatagacaacaactttcaattgccccaacgctataaattggctcccacctaatctcccatctacgtggggtttggagagc

SEQ ID NO: 2555 - DNA, 200 bp, Amaranthus rudis
cataaggttctgctatggtttgagttagctgtgcatttattttaatttgtagggaagttgatgtatccttcatactttttgttcattggtatcatgtatataattgagagcaccgagttaaatttagccgacacattccattttttggggacttttggaaaagagaggcggatggactgctttcgagtagagtataagaa

SEQ ID NO: 2556 - DNA, 200 bp, Amaranthus rudis
ttcttatactctactcgaaagcagtccatccgcctctcttttccaaaagtccccaaaaaatggaatgtgtcggctaaatttaactcggtgctctcaattatatacatgataccaatgaacaaaaagtatgaaggatacatcaacttccctacaaattaaaataaatgcacagctaactcaaaccatagcagaaccttatg

SEQ ID NO: 2557 - DNA, 200 bp, Amaranthus rudis
gtgtctttctttgcaccctggttgtcctcgtcaggccgagttagctgtgtttcaaatttccatccatggaggctgtgtcgactcacctttcaacgagttttaactccattccgaaaagtaatagattgaaccatcaaactgcaaaacgattagggttctccttgaaaccccattcgctgggttttaagttaactccaata

SEQ ID NO: 2558 - DNA, 200 bp, Amaranthus rudis
tattggagttaacttaaaacccagcgaatggggtttcaaggagaaccctaatcgttttgcagtttgatggttcaatctattacttttcggaatggagttaaaactcgttgaaaggtgagtcgacacagcctccatggatggaaatttgaaacacagctaactcggcctgacgaggacaaccagggtgcaaagaaagacac

SEQ ID NO: 2559 - DNA, 200 bp, Amaranthus rudis
gctgggttttaagttaactccaatagaggttggaatttggagtttgataaactggttgtatctgcaagcaatgttgatcaactgggaaatcaaagtaacttatcctttaatcccctttctccctctcgatcaaaggagagacgacatacaatatcagtatttgtgggggatgaaagtggaatgattaatcgaatagcagg

SEQ ID NO: 2560 - DNA, 200 bp, Amaranthus rudis
cctgctattcgattaatcattccactttcatcccccacaaatactgatattgtatgtcgtctctcctttgatcgagagggagaaaggggattaaaggataagttactttgatttcccagttgatcaacattgcttgcagatacaaccagtttatcaaactccaaattccaacctctattggagttaacttaaaacccagc

SEQ ID NO: 2561 - DNA, 200 bp, Amaranthus rudis
gtggaatgattaatcgaatagcaggggtctttgccagaagaggttataatatcgaatcactcgctgttggattgaacaaggacaaagctctcttcactattgtagtttctggaacggataatgtgttgcagcaagtgatggaacagcttcaaaagcttgtcaatgttttgaaggttgaagatatatccaaggagcctcaa

SEQ ID NO: 2562 - DNA, 200 bp, Amaranthus rudis
ttgaggctccttggatatatcttcaaccttcaaaacattgacaagcttttgaagctgttccatcacttgctgcaacacattatccgttccagaaactacaatagtgaagagagctttgtccttgttcaatccaacagcgagtgattcgatattataacctcttctggcaaagacccctgctattcgattaatcattccac

SEQ ID NO: 2563 - DNA, 200 bp, Amaranthus rudis
tgaagatatatccaaggagcctcaagtagaacgtgaattgatgcttgtaaaagttggagctgatcggaataaccgtgctgagctgatgtggttggtggacatctttcgtgccaaaattgtggacatatcggaagagtatctttcaatagaggtcactggagatccaggaaagatggttgctgtccttagaaacctaagca

SEQ ID NO: 2564 - DNA, 200 bp, Amaranthus rudis
tgcttaggtttctaaggacagcaaccatctttcctggatctccagtgacctctattgaaagatactcttccgatatgtccacaattttggcacgaaagatgtccaccaaccacatcagctcagcacggttattccgatcagctccaacttttacaagcatcaattcacgttctacttgaggctccttggatatatcttca

SEQ ID NO: 2565 - DNA, 200 bp, Amaranthus rudis
gttgctgtccttagaaacctaagcaagtttggcattaaagaaattgctcgtaccggaaagattgctctaagaagggaaaaattgggtgagtctgctcctttctggcgtttttctgctgcttcttatcctgatcttgaagaagctatccctatggatgctctttctggagtttccaaaagagcagctgctgctggatcatc

SEQ ID NO: 2566 - DNA, 200 bp, Amaranthus rudis
gatgatccagcagcagctgctcttttggaaactccagaaagagcatccatagggatagcttcttcaagatcaggataagaagcagcagaaaaacgccagaaaggagcagactcacccaatttttcccttcttagagcaatctttccggtacgagcaatttctttaatgccaaacttgcttaggtttctaaggacagcaac

SEQ ID NO: 2567 - DNA, 200 bp, Amaranthus rudis
aaagagcagctgctgctggatcatcggattcgtctgtggagggtgatgtttatcccgtggagccgtttgatggtttctcccctccaatcttagatgctcattggggtattttgaatgaagaagatactagtgggatgcggtcacacactctatctattcttgtcaatgacaaacccggggtccttaatgttgttacgggg

SEQ ID NO: 2568 - DNA, 200 bp, Amaranthus rudis
ccccgtaacaacattaaggaccccgggtttgtcattgacaagaatagatagagtgtgtgaccgcatcccactagtatcttcttcattcaaaataccccaatgagcatctaagattggaggggagaaaccatcaaacggctccacgggataaacatcaccctccacagacgaatccgatgatccagcagcagctgctcttt

SEQ ID NO: 2569 - DNA, 200 bp, Amaranthus rudis
cggggtccttaatgttgttacgggggtttttgctcgaaggggttataacattcagagtttagctgtgggtcatgcggaaggtgagggtctatctcgtatcactactgttgtacccggtacagatgaatcaattagcaaattggttcaacaaatctacaagctggttgatattcatgaggttagagatcttacccattatc

SEQ ID NO: 2570 - DNA, 200 bp, Amaranthus rudis
gataatgggtaagatctctaacctcatgaatatcaaccagcttgtagatttgttgaaccaatttgctaattgattcatctgtaccgggtacaacagtagtgatacgagatagaccctcaccttccgcatgacccacagctaaactctgaatgttataaccccttcgagcaaaaacccccgtaacaacattaaggaccccg

SEQ ID NO: 2571 - DNA, 200 bp, Amaranthus rudis
gaggttagagatcttacccattatccatttgctgagcgagagttgatgttgataaaagtagctgtgaatactgctgcacgtcgtgaggtcctagacgttgccagcatttttagagcaaaagctgttagatgtatctgatcacaccataacacttgagctcactggagatttgaacaagatggttgctctacagagattgc

SEQ ID NO: 2572 - DNA, 200 bp, Amaranthus rudis
gcaatctctgtagagcaaccatcttgttcaaatctccagtgagctcaagtgttatggtgtgatcagatacatctaacagcttttgctctaaaaatgctggcaacgtctaggacctcacgacgtgcagcagtattcacagctacttttatcaacatcaactctcgctcagcaaatggataatgggtaagatctctaacctc

SEQ ID NO: 2573 - DNA, 200 bp, Amaranthus rudis
aagatggttgctctacagagattgctcgaaccgtatggaatctgtgaggttgcacgaacaggacgtgtggccttgagtcgagagtctggtgtagactcgagatatctccgtggatactctttccctgtgtaacagttctgtcaaaacgtatgatgtaaaaagccttggttattttttttgttttacgaaattgtctccag

SEQ ID NO: 2574 - DNA, 200 bp, Amaranthus rudis
ctggagacaatttcgtaaaacaaaaaaaataaccaaggctttttacatcatacgttttgacagaactgttacacagggaaagagtatccacggagatatctcgagtctacaccagactctcgactcaaggccacacgtcctgttcgtgcaacctcacagattccatacggttcgagcaatctctgtagagcaaccatctt

SEQ ID NO: 2575 - DNA, 200 bp, Amaranthus rudis
tattctgatgtactttcgacatgccagtcaagcggacttatgtcacatactctgtccatgctggtaaataatgctcctggagttctgaacaccgttacaggagtaattgctcgtagaggttataacattcaggtcagtatggactctgactgcaccatgaaagtatatcccgtcttttgcattatgttaacttgattgtc

SEQ ID NO: 2576 - DNA, 200 bp, Amaranthus rudis
gacaatcaagttaacataatgcaaaagacgggatatactttcatggtgcagtcagagtccatactgacctgaatgttataacctctacgagcaattactcctgtaacggtgttcagaactccaggagcattatttaccagcatggacagagtatgtgacataagtccgcttgactggcatgtcgaaagtacatcagaata

SEQ ID NO: 2577 - DNA, 200 bp, Amaranthus rudis
tttgcattatgttaacttgattgtccctttttccttcttcctagagtcttgctgtgggccctgctgaaaaggagggtctttctcgtatcaccaccgttgttcctggaaacgacgagtcaattgcaaaattggttcagcaattaaacaaattagtagaccttcatgaggtgagcatctatttgtgtacatcgtaagcataa

SEQ ID NO: 2578 - DNA, 200 bp, Amaranthus rudis
ttatgcttacgatgtacacaaatagatgctcacctcatgaaggtctactaatttgtttaattgctgaaccaattttgcaattgactcgtcgtttccaggaacaacggtggtgatacgagaaagaccctccttttcagcagggcccacagcaagactctaggaagaaggaaaaagggacaatcaagttaacataatgcaaa

SEQ ID NO: 2579 - DNA, 200 bp, Amaranthus rudis
ctatttgtgtacatcgtaagcataattgtccaaattagttagtgtcatgtttacttatgtcgttaatatttaatactattttgatatttgttttttcgactattatgattgaaagattagaatatcttattccggaaaggttgtggtcgcagattcaggaccttactcaccagccatttgcagagcgagagcttatgtta

SEQ ID NO: 2580 - DNA, 200 bp, Amaranthus rudis
taacataagctctcgctctgcaaatggctggtgagtaaggtcctgaatctgcgaccacaacctttccggaataagatattctaatctttcaatcataatagtcgaaaaaacaaatatcaaaatagtattaaatattaacgacataagtaaacatgacactaactaatttggacaattatgcttacgatgtacacaaatag

SEQ ID NO: 2581 - DNA, 200 bp, Amaranthus rudis
tttggtttattgtattttagttgggcctttatgtttgttagtgggctcttgggttctatatatagggatagtctatcattgtaagtcttgtcttgtattttggaataagaaattcaaaaataaggaggctacacaacactcgaagttgtgtgggtttgtgggagtttacacggcactcaaaggtgtgtagtatatcttgt

SEQ ID NO: 2582 - DNA, 200 bp, Amaranthus rudis
acaagatatactacacacctttgagtgccgtgtaaactcccacaaacccacacaacttcgagtgttgtgtagcctccttatttttgaatttcttattccaaaatacaagacaagacttacaatgatagactatccctatatatagaacccaagagcccactaacaaacataaaggcccaactaaaatacaataaaccaaa

SEQ ID NO: 2583 - DNA, 200 bp, Amaranthus rudis
ctcaaaggtgtgtagtatatcttgtgtactgttttctttgtgttctttgaattgctcttggtggaaggcaggaagtattacgtaatactaataatactactaataataatattaatagtaatatgcctaagtttctgatatatacaacaaagtaccaaaattggatctcaaaccctttctatacactaactaatgtaaga

SEQ ID NO: 2584 - DNA, 200 bp, Amaranthus rudis
tcttacattagttagtgtatagaaagggtttgagatccaattttggtactttgttgtatatatcagaaacttaggcatattactattaatattattattagtagtattattagtattacgtaatacttcctgccttccaccaagagcaattcaaagaacacaaagaaaacagtacacaagatatactacacacctttgag

SEQ ID NO: 2585 - DNA, 200 bp, Amaranthus rudis
tttctatacactaactaatgtaagagtgataatccctagtgctgattcgccttttgaattcgcgattcattcaattttgctttttttgatttgtggtggacaagaagattagtgaatcacgtgacactgatttccctttccttcatcttactcataccattttatcctctttccttcatcttactcataccattttatcc

SEQ ID NO: 2586 - DNA, 200 bp, Amaranthus rudis
ggataaaatggtatgagtaagatgaaggaaagaggataaaatggtatgagtaagatgaaggaaagggaaatcagtgtcacgtgattcactaatcttcttgtccaccacaaatcaaaaaaagcaaaattgaatgaatcgcgaattcaaaaggcgaatcagcactagggattatcactcttacattagttagtgtatagaaa

SEQ ID NO: 2587 - DNA, 200 bp, Amaranthus rudis
tcatcttactcataccattttatcctctttccttcgtctctcctttggaattcacctctacttatctctatttctatagttttactttttccccttaagtatttactcctacaagcattcccttatacataaagaacactatttacgacaacaatgcttgatgaatagtatttggtgcagtaaatgtagctgccattata

SEQ ID NO: 2588 - DNA, 200 bp, Amaranthus rudis
tataatggcagctacatttactgcaccaaatactattcatcaagcattgttgtcgtaaatagtgttctttatgtataagggaatgcttgtaggagtaaatacttaaggggaaaaagtaaaactatagaaatagagataagtagaggtgaattccaaaggagagacgaaggaaagaggataaaatggtatgagtaagatga

SEQ ID NO: 2589 - DNA, 200 bp, Amaranthus rudis
tgcagtaaatgtagctgccattataaaacacggaggaaatagaatggaaagttagggataaaatgaaacttactataaattataatacgattaaaaaggaaactgagactttctatttggatcacttgcatatatgagtagattaattattgatggtctcactctggaaatgtattctgatctattttgaatgagtcatt

SEQ ID NO: 2590 - DNA, 200 bp, Amaranthus rudis
aatgactcattcaaaatagatcagaatacatttccagagtgagaccatcaataattaatctactcatatatgcaagtgatccaaatagaaagtctcagtttcctttttaatcgtattataatttatagtaagtttcattttatccctaactttccattctatttcctccgtgttttataatggcagctacatttactgca

SEQ ID NO: 2591 - DNA, 200 bp, Amaranthus rudis
tctgatctattttgaatgagtcattgaatgagatttttattccggatccaggttagagatcttacccattatccatttgctgagcgagagttgatgttgataaaagtagctgtgaatactgctgcacgtcgtgaggtcctagacgttgccagcatttttagagcaaaagctgtagatgtatctgatcacaccataacact

SEQ ID NO: 2592 - DNA, 200 bp, Amaranthus rudis
agtgttatggtgtgatcagatacatctacagcttttgctctaaaaatgctggcaacgtctaggacctcacgacgtgcagcagtattcacagctacttttatcaacatcaactctcgctcagcaaatggataatgggtaagatctctaacctggatccggaataaaaatctcattcaatgactcattcaaaatagatcaga

SEQ ID NO: 2593 - DNA, 200 bp, Amaranthus rudis
atgtatctgatcacaccataacacttgaggtaagttttggggagttttattaatttttatttataaatggtgtcccgttttctttcaattcgaaaaggtcaatgtttataaaaagacaaccaacagaatagatgtagctctgttaagtatttgtatgacattgtgctcttaagatatgtaagctgttggattgccttgca

SEQ ID NO: 2594 - DNA, 200 bp, Amaranthus rudis
tgcaaggcaatccaacagcttacatatcttaagagcacaatgtcatacaaatacttaacagagctacatctattctgttggttgtctttttataaacattgaccttttcgaattgaaagaaaacgggacaccatttataaataaaaattaataaaactccccaaaacttacctcaagtgttatggtgtgatcagatacat

SEQ ID NO: 2595 - DNA, 200 bp, Amaranthus rudis
atgtaagctgttggattgccttgcaacgttcatatttttgttgtacatcattctgcttttactttacggagcctgattttgattaatggggattttgactcagctcactggagatttgaacaagatggttgctctacagagattgctcgaaccgtatggaatctgtgaggtaagatagtatttttggacaatatagagtt

SEQ ID NO: 2596 - DNA, 200 bp, Amaranthus rudis
aactctatattgtccaaaaatactatcttacctcacagattccatacggttcgagcaatctctgtagagcaaccatcttgttcaaatctccagtgagctgagtcaaaatccccattaatcaaaatcaggctccgtaaagtaaaagcagaatgatgtacaacaaaaatatgaacgttgcaaggcaatccaacagcttacat

SEQ ID NO: 2597 - DNA, 200 bp, Amaranthus rudis
tagtatttttggacaatatagagtttcctgaatggataaaagcattattgtttttatgtttgctgttttctaattgatttccgcaatagaaatgtcaaaattatcctattgcaggtcttattgtcattgatgctccttattccataatgcaatcaccatttgcttatattaaacacaatgtgtacatatctttttgattt

SEQ ID NO: 2598 - DNA, 200 bp, Amaranthus rudis
aaatcaaaaagatatgtacacattgtgtttaatataagcaaatggtgattgcattatggaataaggagcatcaatgacaataagacctgcaataggataattttgacatttctattgcggaaatcaattagaaaacagcaaacataaaaacaataatgcttttatccattcaggaaactctatattgtccaaaaatacta

SEQ ID NO: 2599 - DNA, 200 bp, Amaranthus rudis
ttttttgagctgcacagtactataaattggttttagtctgctctgctagtatcctgatttgcttcgttcttcatgccagtcaagtggtctccggtcacatacgctgtccatgctggtaaataatgctcctggagttctgaacaccgttacaggagtaattgctcgtagaggttataacattcaggtcagtatggactctg

SEQ ID NO: 2600 - DNA, 200 bp, Amaranthus rudis
cagagtccatactgacctgaatgttataacctctacgagcaattactcctgtaacggtgttcagaactccaggagcattatttaccagcatggacagcgtatgtgaccggagaccacttgactggcatgaagaacgaagcaaatcaggatactagcagagcagactaaaaccaatttatagtactgtgcagctcaaaaaa

SEQ ID NO: 2601 - DNA, 200 bp, Amaranthus rudis
aacattcaggtcagtatggactctgactgcaccatgaaagtatatcccgtcttttgcattatgttaacttgattgtccgttttcccttcttcccagagtcttgctgtgggccctgctgaaaaggagggtctttctcgtatcacaactgtcattcctggaaacgatgagtcgattggaaaattggttcagcaatttaacaa

SEQ ID NO: 2602 - DNA, 200 bp, Amaranthus rudis
ttgttaaattgctgaaccaattttccaatcgactcatcgtttccaggaatgacagttgtgatacgagaaagaccctccttttcagcagggcccacagcaagactctgggaagaagggaaaacggacaatcaagttaacataatgcaaaagacgggatatactttcatggtgcagtcagagtccatactgacctgaatgtt

SEQ ID NO: 2603 - DNA, 200 bp, Amaranthus rudis
gaaaattggttcagcaatttaacaagttagtagaccttcatgaggtgagcatctatttgtgtacatcgtaggcataattgtccaaattagttagtgtcatgtttacttatgtcgttaatatttaatactattttgatatttgttttttcgactattatgattgaaagattagaatatcttattccggaaagtttgttgtc

SEQ ID NO: 2604 - DNA, 200 bp, Amaranthus rudis
gacaacaaactttccggaataagatattctaatctttcaatcataatagtcgaaaaaacaaatatcaaaatagtattaaatattaacgacataagtaaacatgacactaactaatttggacaattatgcctacgatgtacacaaatagatgctcacctcatgaaggtctactaacttgttaaattgctgaaccaattttc

SEQ ID NO: 2605 - DNA, 200 bp, Amaranthus rudis
atcttattccggaaagtttgttgtcgcagattcaggaccttactcaccagccatttgcagagcgagagcttatgttaattaaagtagcggcaaatacttctgccaggagagacgtccttgatattgctaatattttccgtgcaaaacctgtggatgtttctgatcatacaataacattacaggtactaagccgtaggcac

SEQ ID NO: 2606 - DNA, 200 bp, Amaranthus rudis
gtgcctacggcttagtacctgtaatgttattgtatgatcagaaacatccacaggttttgcacggaaaatattagcaatatcaaggacgtctctcctggcagaagtatttgccgctactttaattaacataagctctcgctctgcaaatggctggtgagtaaggtcctgaatctgcgacaacaaactttccggaataagat

SEQ ID NO: 2607 - DNA, 200 bp, Amaranthus rudis
attacaggtactaagccgtaggcacacaatttttgccatgttccttgttttttcctaatatttccgacttggtcttttccagctcgccaatatgttgggattaaggctttggcattattgtgttatttttgcgttttttccaacttccttatattgggattaaggctttggcgttgttgcattgttgactgttgttgtgt

SEQ ID NO: 2608 - DNA, 200 bp, Amaranthus rudis
acacaacaacagtcaacaatgcaacaacgccaaagccttaatcccaatataaggaagttggaaaaaacgcaaaaataacacaataatgccaaagccttaatcccaacatattggcgagctggaaaagaccaagtcggaaatattaggaaaaaacaaggaacatggcaaaaattgtgtgcctacggcttagtacctgtaat

SEQ ID NO: 2609 - DNA, 200 bp, Amaranthus rudis
gttgcattgttgactgttgttgtgtcttttccagcttacgggtgatttacacaaaatggttgcgctacaaagattattggagccttatggcatttgtgaggtatgcgcctatgtattattgttttttctatataatcagattttatttatttatttttggttcgaaatctgttgattgttagttattttgcttttgaata

SEQ ID NO: 2610 - DNA, 200 bp, Amaranthus rudis
tattcaaaagcaaaataactaacaatcaacagatttcgaaccaaaaataaataaataaaatctgattatatagaaaaaacaataatacataggcgcatacctcacaaatgccataaggctccaataatctttgtagcgcaaccattttgtgtaaatcacccgtaagctggaaaagacacaacaacagtcaacaatgcaac

SEQ ID NO: 2611 - DNA, 200 bp, Amaranthus rudis
ttgttagttattttgcttttgaatataaatggattatcctgtctgtagattaagaacaatcctgctaaataagaaaatacacacatagaccatagtgcaaaaacacagtaaaggtcgccatcgcggttatagatattgtgatgcggtaatggggatgatgttgtgtggttgttatcataataattcataacgccatatgt

SEQ ID NO: 2612 - DNA, 200 bp, Amaranthus rudis
acatatggcgttatgaattattatgataacaaccacacaacatcatccccattaccgcatcacaatatctataaccgcgatggcgacctttactgtgtttttgcactatggtctatgtgtgtattttcttatttagcaggattgttcttaatctacagacaggataatccatttatattcaaaagcaaaataactaacaa

SEQ ID NO: 2613 - DNA, 200 bp, Amaranthus rudis
cataataattcataacgccatatgtcggctgaaaacatgagaagcgatattccttgaaacaacccaaacacggttttctttacctataagcgaatatcggttcgattttttgaaaaattttacaatgctgccctgtttttgcacaatggagacacgagcacgcccacacacacatatatagggaaaggatcatgtgaaaa

SEQ ID NO: 2614 - DNA, 200 bp, Amaranthus rudis
ttttcacatgatcctttccctatatatgtgtgtgtgggcgtgctcgtgtctccattgtgcaaaaacagggcagcattgtaaaatttttcaaaaaatcgaaccgatattcgcttataggtaaagaaaaccgtgtttgggttgtttcaaggaatatcgcttctcatgttttcagccgacatatggcgttatgaattattatg

SEQ ID NO: 2615 - DNA, 200 bp, Amaranthus rudis
atatagggaaaggatcatgtgaaaacaaaaaagtggaccatgaaaatggatgagtgagcaataaacgtgaagatatcgtgaagttatccttcaatactataaaatggttttcactagatcatatatacttcacatcttataattgttttatacccttatgtacctcatgtgcatattatatgtgaagttccagataatat

SEQ ID NO: 2616 - DNA, 200 bp, Amaranthus rudis
atattatctggaacttcacatataatatgcacatgaggtacataagggtataaaacaattataagatgtgaagtatatatgatctagtgaaaaccattttatagtattgaaggataacttcacgatatcttcacgtttattgctcactcatccattttcatggtccacttttttgttttcacatgatcctttccctatat

SEQ ID NO: 2617 - DNA, 200 bp, Amaranthus spinosus
ctaccatctccattctccccatttcatttctttctcataactctctaatggcggccatttcctttaacatcaatggcggaaagatcggaactttatgtccaaaacctaaatatggttgtgggtttttgagaaaatgggattttggagctcatacaactgtatctactaaacccatgtcaaaaattttaagcttgaaagca

SEQ ID NO: 2618 - DNA, 200 bp, Amaranthus spinosus
tgctttcaagcttaaaatttttgacatgggtttagtagatacagttgtatgagctccaaaatcccattttctcaaaaacccacaaccatatttaggttttggacataaagttccgatctttccgccattgatgttaaaggaaatggccgccattagagagttatgagaaagaaatgaaatggggagaatggagatggtag

SEQ ID NO: 2619 - DNA, 200 bp, Amaranthus spinosus
gtcaaaaattttaagcttgaaagcagttgaagtttctgctgatgctacagtaaatgcagtttctgtttcatctaattctagggtgatgcgccacacaatttcagtctttgtcggggatgaaagtggtataatcaataggattgcaggcgttatttctagaagaggatacaatatcgagtctttggctgtttgtttaaaca

SEQ ID NO: 2620 - DNA, 200 bp, Amaranthus spinosus
tgtttaaacaaacagccaaagactcgatattgtatcctcttctagaaataacgcctgcaatcctattgattataccactttcatccccgacaaagactgaaattgtgtggcgcatcaccctagaattagatgaaacagaaactgcatttactgtagcatcagcagaaacttcaactgctttcaagcttaaaatttttgac

SEQ ID NO: 2621 - DNA, 200 bp, Amaranthus spinosus
gagtctttggctgtttgtttaaacaaggataaggctctttttactatagtagtgtgtggaactgacaaggtgttgcgccaagtaatggagcagctcagcaagcttgttaatgtcttaaaggttgaagatctatctagagagcctcaagtggaacgtgagcttatgctattaaagcttcattctaatgcagatacccatgc

SEQ ID NO: 2622 - DNA, 200 bp, Amaranthus spinosus
gcatgggtatctgcattagaatgaagctttaatagcataagctcacgttccacttgaggctctctagatagatcttcaacctttaagacattaacaagcttgctgagctgctccattacttggcgcaacaccttgtcagttccacacactactatagtaaaaagagccttatccttgtttaaacaaacagccaaagactc

SEQ ID NO: 2623 - DNA, 200 bp, Amaranthus spinosus
ttcattctaatgcagatacccatgcagagataatgtggttagtggacatcttcagagcaaaaattgtcgatatgtcggaaagcttcgttactgtagaggtgactggtgatcctggaaagatggctgctgtcctgagaaattttagcaagtatggaatcaaagaagttgcaagaacaggaaagattgctctaagacgggaa

SEQ ID NO: 2624 - DNA, 200 bp, Amaranthus spinosus
ttcccgtcttagagcaatctttcctgttcttgcaacttctttgattccatacttgctaaaatttctcaggacagcagccatctttccaggatcaccagtcacctctacagtaacgaagctttccgacatatcgacaatttttgctctgaagatgtccactaaccacattatctctgcatgggtatctgcattagaatgaa

SEQ ID NO: 2625 - DNA, 200 bp, Amaranthus spinosus
aggaaagattgctctaagacgggaaaggatgggccagacagctcctttttggagattctctgctgcatcttatccagatctaaaagaaaaggctgttgaatcttttgtcaggcctgccaaaagaaacatcaacgctgatcctggctcatcgtctagtggtgatgtttatccagtggagccttatgaagcctccataaata

SEQ ID NO: 2626 - DNA, 200 bp, Amaranthus spinosus
tatttatggaggcttcataaggctccactggataaacatcaccactagacgatgagccaggatcagcgttgatgtttcttttggcaggcctgacaaaagattcaacagccttttcttttagatctggataagatgcagcagagaatctccaaaaaggagctgtctggcccatcctttcccgtcttagagcaatctttcct

SEQ ID NO: 2627 - DNA, 200 bp, Amaranthus spinosus
gagccttatgaagcctccataaatacagtacttgatgctcactggggcgttctttacgaaaatgattcaagcggacttgtatcacatactctgtccatgctggtaaataatgctcctggagttctgaacaccgttacaggagtaattgctcgtagaggttataacattcagagtcttgctgtgggccctgctgaaaagga

SEQ ID NO: 2628 - DNA, 200 bp, Amaranthus spinosus
tccttttcagcagggcccacagcaagactctgaatgttataacctctacgagcaattactcctgtaacggtgttcagaactccaggagcattatttaccagcatggacagagtatgtgatacaagtccgcttgaatcattttcgtaaagaacgccccagtgagcatcaagtactgtatttatggaggcttcataaggctc

SEQ ID NO: 2629 - DNA, 200 bp, Amaranthus spinosus
ttgctgtgggccctgctgaaaaggagggtctttctcgtatcacaactgttgttcctggaaacgacgagtcaattgcaaaattggttcagcaattaacaaattagtagaccttcatgagattcaggaccttacgcaccagccatttgcagagcgagagcttatgttaattaaagtagctgcaaatactacagccaggagag

SEQ ID NO: 2630 - DNA, 200 bp, Amaranthus spinosus
ctctcctggctgtagtatttgcagctactttaattaacataagctctcgctctgcaaatggctggtgcgtaaggtcctgaatctcatgaaggtctactaatttgttaattgctgaaccaattttgcaattgactcgtcgtttccaggaacaacagttgtgatacgagaaagaccctccttttcagcagggcccacagcaa

SEQ ID NO: 2631 - DNA, 200 bp, Amaranthus spinosus; identical to SEQ ID NO: 2617

SEQ ID NO: 2632 - DNA, 200 bp, Amaranthus spinosus; identical to SEQ ID NO: 2618

SEQ ID NO: 2633 - DNA, 200 bp, Amaranthus spinosus; identical to SEQ ID NO: 2619

SEQ ID NO: 2634 - DNA, 200 bp, Amaranthus spinosus; identical to SEQ ID NO: 2620

SEQ ID NO: 2635 - DNA, 200 bp, Amaranthus spinosus
gagtctttggctgtttgtttaaacaaggataaggctctttttactatagtagtgtgtggaactgacaaggtgttgcgccaagtcgtggaacagcttaacaagcttgttagtgttttgaaggttgaagatctatcgagagagccacaagtggaacgtgaactgatgcttgtaaagcttaattctgattcaaattcccacgc

SEQ ID NO: 2636 - DNA, 200 bp, Amaranthus spinosus
gcgtgggaatttgaatcagaattaagctttacaagcatcagttcacgttccacttgtggctctctcgatagatcttcaaccttcaaaacactaacaagcttgttaagctgttccacgacttggcgcaacaccttgtcagttccacacactactatagtaaaaagagccttatccttgtttaaacaaacagccaaagactc

SEQ ID NO: 2637 - DNA, 200 bp, Amaranthus spinosus
ctcatcaggccgagttagctgtgtttcaaatttccatccatggaggctgtgtcgactcacctttcaacgagttttaactccattccgaaaagcaatagattgagccaccaaactgcaaaacgattagggttctccttgaaaccccattctctgggttttaagtttaactccaatagtgacaggaattcggagtttgataa

SEQ ID NO: 2638 - DNA, 200 bp, Amaranthus spinosus
ttatcaaactccgaattcctgtcactattggagttaaacttaaaacccagagaatggggtttcaaggagaaccctaatcgttttgcagtttggtggctcaatctattgcttttcggaatggagttaaaactcgttgaaaggtgagtcgacacagcctccatggatggaaatttgaaacacagctaactcggcctgatgag

SEQ ID NO: 2639 - DNA, 200 bp, Amaranthus spinosus
gtgacaggaattcggagtttgataaactggttgtatctgcaagcaatgttgatcaactgggaaatcaaagtaacttatcctttaatcccccttctccctctcgatcaaaggagagacgacatacaatatcagtatttgtgggggatgaaagtggaatgattaatcgaatagcaggggttttgccagaagaggttataata

SEQ ID NO: 2640 - DNA, 200 bp, Amaranthus spinosus
tattataacctcttctggcaaaacccctgctattcgattaatcattccactttcatcccccacaaatactgatattgtatgtcgtctctcctttgatcgagagggagaagggggattaaaggataagttactttgatttcccagttgatcaacattgcttgcagatacaaccagtttatcaaactccgaattcctgtcac

SEQ ID NO: 2641 - DNA, 200 bp, Amaranthus thunbergii
tctctaatggcggctgtttccttcaatattaatggtggaaagattggaattttatgttcaagacacgaattcggttgtgggtttgtaagaaaattggattttagaactcatacttctatatttgaaaaacatatgccaaaaacttcaagttttaaagcaatggaagtttctgcaaatgcaacagtaaatatagttccagt

SEQ ID NO: 2642 - DNA, 200 bp, Amaranthus thunbergii
actggaactatatttactgttgcatttgcagaaacttccattgctttaaaacttgaagtttttggcatatgtttttcaaatatagaagtatgagttctaaaatccaattttcttacaaacccacaaccgaattcgtgtcttgaacataaaattccaatctttccaccattaatattgaaggaaacagccgccattagaga

SEQ ID NO: 2643 - DNA, 200 bp, Amaranthus thunbergii
atgcaacagtaaatatagttccagtttcagctcattctagggtgatgcgccacacaatttcagtctttgttggggatgaaagtggtataatcaataggattgccggcgttatttctaggagaggatacaacatagagtctcttgctgttggtttaaataaggataaggctctttttactatagtagtgtgtggaactgac

SEQ ID NO: 2644 - DNA, 200 bp, Amaranthus thunbergii
gtcagttccacacactactatagtaaaaagagccttatccttatttaaaccaacagcaagagactctatgttgtatcctctcctagaaataacgccggcaatcctattgattataccactttcatccccaacaaagactgaaattgtgtggcgcatcaccctagaatgagctgaaactggaactatatttactgttgcat

SEQ ID NO: 2645 - DNA, 200 bp, Amaranthus viridis
ctaccatctccattctccccatttcatttctttctcatctctctccaatggcggccatttcctttaacatcaatggcggaaagattggaactttatgtccaaaacctaaatatggttgtgggtttttgagaaaatgggattttggagctcatacaactgtatatactaaacccatgtcaaaaatttcaagcctgaaagca

SEQ ID NO: 2646 - DNA, 200 bp, Amaranthus viridis
tgctttcaggcttgaaatttttgacatgggtttagtatatacagttgtatgagctccaaaatcccattttctcaaaaacccacaaccatatttaggttttggacataaagttccaatctttccgccattgatgttaaaggaaatggccgccattggagagagatgagaaagaaatgaaatggggagaatggagatggtag

SEQ ID NO: 2647 - DNA, 200 bp, Amaranthus viridis
gtcaaaaatttcaagcctgaaagcagttgaagtttctaccaatgctacagtaaaatgcagtttctgtttcagctaattctagggtgatgcgatcacacaatttctgtctttgtcggggatgaaagtggataatcaataggattgcaggtgttatttctagaagaggatacaatatcgagtctttggctgtttgtttaaac

SEQ ID NO: 2648 - DNA, 200 bp, Amaranthus viridis
gtttaaacaaacagccaaagactcgatattgtatcctcttctagaaataacacctgcaatcctattgattatccactttcatccccgacaaagacagaaattgtgtgatcgcatcaccctagaattagctgaaacagaaactgcattttactgtagcattggtagaaacttcaactgctttcaggcttgaaatttttgac

SEQ ID NO: 2649 - DNA, 200 bp, Amaranthus viridis
cgagtctttggctgtttgtttaaacaaggataaggctctttttactatagaagtgtgtggaactgacaaggtgttgcgccaagtcgtggaacagcttaacaagcttgttagtgttttgaaggttgaagatctatcgagagagccacaagtggaacgtgaactgatgcttgtaaagcttaattctgatgcaattcccacgc

SEQ ID NO: 2650 - DNA, 200 bp, Amaranthus viridis
gcgtgggaattgcatcagaattaagctttacaagcatcagttcacgttccacttgtggctctctcgatagatcttcaaccttcaaaacactaacaagcttgttaagctgttccacgacttggcgcaacaccttgtcagttccacacacttctatagtaaaaagagccttatccttgtttaaacaaacagccaaagactcg

SEQ ID NO: 2651 - DNA, 200 bp, Amaranthus viridis
cttaattctgatgcaattcccacgcagagctaatgtggctagtggacatcttcagggcaaaaattgtggatatctcagaaagcttggtcactgttgaggtgaccggagatcctggaaagttggctgctgtcctaagaaattttagaaagtttggaatcaaagaaattgcaaggaccggtaagattgctctaagacgagaa

SEQ ID NO: 2652 - DNA, 200 bp, Amaranthus viridis
ttctcgtcttagagcaatcttaccggtccttgcaatttctttgattccaaactttctaaaatttcttaggacagcagccaactttccaggatctccggtcacctcaacagtgaccaagctttctgagatatccacaatttttgccctgaagatgtccactagccacattagctctgcgtgggaattgcatcagaattaag

SEQ ID NO: 2653 - DNA, 200 bp, Amaranthus viridis
cggtaagattgctctaagacgagaaaggatgggccagacagctcctttttggagattctctgctgcatcttatccagatctacaagaaaaggctgttgaatcttttgtcaggcctgccaaaagaaacatcaacgctgatcctggctcatcgtctagtggtgatgtttatccagtggagccttatgaagcctccataaata

SEQ ID NO: 2654 - DNA, 200 bp, Amaranthus viridis
tatttatggaggcttcataaggctccactggataaacatcaccactagacgatgagccaggatcagcgttgatgtttcttttggcaggcctgacaaaagattcaacagccttttcttgtagatctggataagatgcagcagagaatctccaaaaaggagctgtctggcccatcctttctcgtcttagagcaatcttaccg

SEQ ID NO: 2655 - DNA, 200 bp, Amaranthus viridis; identical to SEQ ID NO: 2627

SEQ ID NO: 2656 - DNA, 200 bp, Amaranthus viridis; identical to SEQ ID NO: 2628

SEQ ID NO: 2657 - DNA, 200 bp, Amaranthus viridis
ttgctgtgggccctgctgaaaaggagggtctttctcgtatcacaactgttgttcctggaaacgacgagtcaattgcaaaattggttcagcaattaaacaaattagtagaccttcatgagattcaggaccttacgcaccagccatttgcagagcgagagcttatgttaattaaagtagcggcaaatacttctgccaggaga

SEQ ID NO: 2658 - DNA, 200 bp, Amaranthus viridis
tctcctggcagaagtatttgccgctactttaattaacataagctctcgctctgcaaatggctggtgcgtaaggtcctgaatctcatgaaggtctactaatttgtttaattgctgaaccaattttgcaattgactcgtcgtttccaggaacaacagttgtgatacgagaaagaccctccttttcagcagggcccacagcaa

SEQ ID NO: 2659 - DNA, 200 bp, Amaranthus viridis
agcggcaaatacttctgccaggagagacgtccttgatattgctaatattttccgtgcgaaacctgtggatgtttctgatcacacaataacattacaacttgctggtgatttagacaaaatggttgcgctacagagattattggagccttacggcatttgtgaggtggcacggactggaagagtagcactaacgagagagt

SEQ ID NO: 2660 - DNA, 200 bp, Amaranthus viridis
actctctcgttagtgctactcttccagtccgtgccacctcacaaatgccgtaaggctccaataatctctgtagcgcaaccattttgtctaaatcaccagcaagttgtaatgttattgtgtgatcagaaacatccacaggtttcgcacggaaaatattagcaatatcaaggacgtctctcctggcagaagtatttgccgct

SEQ ID NO: 2661 - DNA, 200 bp, Amaranthus viridis
ggaagagtagcactaacgagagagtctagggtagattccaaatatctacgaggatacactcttccgttgtatgaatgaaaaactcgggctatgtctttccgacattaccttgtctgattccttccgctcttctacactgcattgcaagcagaacaattgcccacaagtggagtaaattaaaaggggaaacaacaataccg

SEQ ID NO: 2662 - DNA, 200 bp, Amaranthus viridis
cggtattgttgtttccccttttaatttactccacttgtgggcaattgttctgcttgcaatgcagtgtagaagagcggaaggaatcagacaaggtaatgtcggaaagacatagcccgagtttttcattcatacaacggaagagtgtatcctcgtagatatttggaatctaccctagactctctcgttagtgctactcttcc

SEQ ID NO: 2663 - DNA, 200 bp, Amaranthus viridis; identical to SEQ ID NO: 2645

SEQ ID NO: 2664 - DNA, 200 bp, Amaranthus viridis; identical to SEQ ID NO: 2646

SEQ ID NO: 2665 - DNA, 200 bp, Amaranthus viridis; identical to SEQ ID NO: 2647

SEQ ID NO: 2666 - DNA, 200 bp, Amaranthus viridis; identical to SEQ ID NO: 2648

SEQ ID NO: 2667 - DNA, 200 bp, Amaranthus viridis; identical to SEQ ID NO: 2649

SEQ ID NO: 2668 - DNA, 200 bp, Amaranthus viridis; identical to SEQ ID NO: 2650

SEQ ID NO: 2669 - DNA, 200 bp, Amaranthus viridis; identical to SEQ ID NO: 2651

SEQ ID NO: 2670 - DNA, 200 bp, Amaranthus viridis; identical to SEQ ID NO: 2652

SEQ ID NO: 2671 - DNA, 200 bp, Amaranthus viridis; identical to SEQ ID NO: 2653

SEQ ID NO: 2672 - DNA, 200 bp, Amaranthus viridis; identical to SEQ ID NO: 2654

SEQ ID NO: 2673 - DNA, 200 bp, Amaranthus viridis
gagccttatgaagcctccataaatacagtacttgatgctcactggggcgttctttacgaaaatgattcaagcggacttgtatcacatactctgtccatgctggtaaataatgctcctggagttctgaacaccgttacaggagtaatttctcgtaggggttataacattcagagtcttgctgtaggccctgctgaaaagga

SEQ ID NO: 2674 - DNA, 200 bp, Amaranthus viridis
tccttttcagcagggcctacagcaagactctgaatgttataacccctacgagaaattactcctgtaacggtgttcagaactccaggagcattatttaccagcatggacagagtatgtgatacaagtccgcttgaatcattttcgtaaagaacgccccagtgagcatcaagtactgtatttatggaggcttcataaggctc

SEQ ID NO: 2675 - DNA, 200 bp, Amaranthus viridis
ttgctgtaggccctgctgaaaaggagggtctttctcgtatcacaactgtcattcctggaaacgacgagtcgattggaaaattggttcagcaattcaacaagttagtagaccttcatgagattcaggaccttactcaccagccattttcagagcgagagcttatgttgatcaaaatagctgcaaatactacagccaggaga

SEQ ID NO: 2676 - DNA, 200 bp, Amaranthus viridis
tctcctggctgtagtatttgcagctattttgatcaacataagctctcgctctgaaaatggctggtgagtaaggtcctgaatctcatgaaggtctactaacttgttgaattgctgaaccaattttccaatcgactcgtcgtttccaggaatgacagttgtgatacgagaaagaccctccttttcagcagggcctacagcaa

SEQ ID NO: 2677 - DNA, 200 bp, Amaranthus viridis
agctgcaaatactacagccaggagagatgtccttgatattgctaatattttccgtgcaaaagctgtggatgtttcggatcacacgataacattacagcttgcgggtgatttacacaaaatggttgcgctacaaagattattggagccttatggcatttgtgaggtggcacggacaggaagagtcgcactgagtagagagt

SEQ ID NO: 2678 - DNA, 200 bp, Amaranthus viridis
actctctactcagtgcgactcttcctgtccgtgccacctcacaaatgccataaggctccaataatctttgtagcgcaaccattttgtgtaaatcacccgcaagctgtaatgttatcgtgtgatccgaaacatccacagcttttgcacggaaaatattagcaatatcaaggacatctctcctggctgtagtatttgcagct

SEQ ID NO: 2679 - DNA, 200 bp, Amaranthus viridis; identical to SEQ ID NO: 2645

SEQ ID NO: 2680 - DNA, 200 bp, Amaranthus viridis; identical to SEQ ID NO: 2646

SEQ ID NO: 2681 - DNA, 200 bp, Amaranthus viridis; identical to SEQ ID NO: 2647

SEQ ID NO: 2682 - DNA, 200 bp, Amaranthus viridis; identical to SEQ ID NO: 2648

SEQ ID NO: 2683 - DNA, 200 bp, Amaranthus viridis; identical to SEQ ID NO: 2649

SEQ ID NO: 2684 - DNA, 200 bp, Amaranthus viridis; identical to SEQ ID NO: 2650

SEQ ID NO: 2685 - DNA, 200 bp, Amaranthus viridis; identical to SEQ ID NO: 2651

SEQ ID NO: 2686 - DNA, 200 bp, Amaranthus viridis; identical to SEQ ID NO: 2652

SEQ ID NO: 2687 - DNA, 200 bp, Amaranthus viridis
cggtaagattgctctaagacgagaaaggatgggccagacagctcctttttggagattctctgctgcatcttatccagatctacaagaaaaggctgttgatgatctggccaggcctacgaaacggagcatcaatggtgattctggctcatcttcaagtggtgatgtttatccggtggaaccttatgatggttcgatggtaa

SEQ ID NO: 2688 - DNA, 200 bp, Amaranthus viridis
ttaccatcgaaccatcataaggttccaccggataaacatcaccacttgaagatgagccagaatcaccattgatgctccgtttcgtaggcctggccagatcatcaacagccttttcttgtagatctggataagatgcagcagagaatctccaaaaaggagctgtctggcccatcctttctcgtcttagagcaatcttaccg

SEQ ID NO: 2689 - DNA, 200 bp, Amaranthus viridis
gaaccttatgatggttcgatggtaaatcaagtacttgatgctcactggggcgtactttatgacggtgattcaagtggtctccggtcacatactctgtccatgctggtaaataatgctcctggagttctgaacaccgttacaggagtaattgctcgtagaggttataacattcagagtcttgctgtgggccctgctgaaaa

SEQ ID NO: 2690 - DNA, 200 bp, Amaranthus viridis
ttttcagcagggcccacagcaagactctgaatgttataacctctacgagcaattactcctgtaacggtgttcagaactccaggagcattatttaccagcatggacagagtatgtgaccggagaccacttgaatcaccgtcataaagtacgccccagtgagcatcaagtacttgatttaccatcgaaccatcataaggttc

SEQ ID NO: 2691 - DNA, 200 bp, Amaranthus viridis
gtcttgctgtgggccctgctgaaaaggagggtctttctcgtatcacaactgttgttcctggaaacgacgagtcaattgcaaaattggttcagcaattaaacaaattagtagaccttcatgagattcaggaccttacgcaccagccatttgcagagcgagagcttatgttaattaaagtagcggcaaatacttctgccagg

SEQ ID NO: 2692 - DNA, 200 bp, Amaranthus viridis
cctggcagaagtatttgccgctactttaattaacataagctctcgctctgcaaatggctggtgcgtaaggtcctgaatctcatgaaggtctactaatttgtttaattgctgaaccaattttgcaattgactcgtcgtttccaggaacaacagttgtgatacgagaaagaccctccttttcagcagggcccacagcaagac

SEQ ID NO: 2693 - DNA, 200 bp, Amaranthus viridis
agtagcggcaaatacttctgccaggagagacgtccttgatattgctaatattttccgtgcgaaacctgtggatgtttctgatcacacaataacattacaacttgctggtgatttagacaaaatggttgcgctacagagattattggagccttacggcatttgtgaggtggcacggactggaagagtagcactaacgagag

SEQ ID NO: 2694 - DNA, 200 bp, Amaranthus viridis
ctctcgttagtgctactcttccagtccgtgccacctcacaaatgccgtaaggctccaataatctctgtagcgcaaccattttgtctaaatcaccagcaagttgtaatgttattgtgtgatcagaaacatccacaggtttcgcacggaaaatattagcaatatcaaggacgtctctcctggcagaagtatttgccgctact

SEQ ID NO: 2695 - DNA, 200 bp, Amaranthus viridis
actggaagagtagcactaacgagagagtctagggtagattccaaatatctacgaggatacactcttccgttgtatgaatgaaaaactcgggctatgtctttccgacattaccttgtctgattccttccgctcttctacactgcattgcaagcagaacaattgcccacaagtggagtaaattaaaaggggaaacaacaata

SEQ ID NO: 2696 - DNA, 200 bp, Amaranthus viridis
tattgttgtttccccttttaatttactccacttgtgggcaattgttctgcttgcaatgcagtgtagaagagcggaaggaatcagacaaggtaatgtcggaaagacatagcccgagtttttcattcatacaacggaagagtgtatcctcgtagatatttggaatctaccctagactctctcgttagtgctactcttccagt

SEQ ID NO: 2697 - DNA, 200 bp, Amaranthus viridis; identical to SEQ ID NO: 2645

SEQ ID NO: 2698 - DNA, 200 bp, Amaranthus viridis; identical to SEQ ID NO: 2646

SEQ ID NO: 2699 - DNA, 200 bp, Amaranthus viridis; identical to SEQ ID NO: 2647

SEQ ID NO: 2700 - DNA, 200 bp, Amaranthus viridis; identical to SEQ ID NO: 2648

SEQ ID NO: 2701 - DNA, 200 bp, Amaranthus viridis; identical to SEQ ID NO: 2649

SEQ ID NO: 2702 - DNA, 200 bp, Amaranthus viridis; identical to SEQ ID NO: 2650

SEQ ID NO: 2703 - DNA, 200 bp, Amaranthus viridis; identical to SEQ ID NO: 2651

SEQ ID NO: 2704 - DNA, 200 bp, Amaranthus viridis; identical to SEQ ID NO: 2652

SEQ ID NO: 2705 - DNA, 200 bp, Amaranthus viridis; identical to SEQ ID NO: 2687

SEQ ID NO: 2706 - DNA, 200 bp, Amaranthus viridis; identical to SEQ ID NO: 2688

SEQ ID NO: 2707 - DNA, 200 bp, Amaranthus viridis
gaaccttatgatggttcgatggtaaatcaagtacttgatgctcactggggcgtactttatgacggtgattcaagtggtctccggtcacatactctgtccatgctggtaaataatgctcctggagttctgaacaccgttacaggagtaatttctcgtaggggttataacattcagagtcttgctgtaggccctgctgaaaa

SEQ ID NO: 2708 - DNA, 200 bp, Amaranthus viridis
ttttcagcagggcctacagcaagactctgaatgttataacccctacgagaaattactcctgtaacggtgttcagaactccaggagcattatttaccagcatggacagagtatgtgaccggagaccacttgaatcaccgtcataaagtacgccccagtgagcatcaagtacttgatttaccatcgaaccatcataaggttc

SEQ ID NO: 2709 - DNA, 200 bp, Amaranthus viridis
gtcttgctgtaggccctgctgaaaaggagggtctttctcgtatcacaactgtcattcctggaaacgacgagtcgattggaaaattggttcagcaattcaacaagttagtagaccttcatgagattcaggaccttactcaccagccattttcagagcgagagcttatgttgatcaaaatagctgcaaatactacagccagg

SEQ ID NO: 2710 - DNA, 200 bp, Amaranthus viridis
cctggctgtagtatttgcagctattttgatcaacataagctctcgctctgaaaatggctggtgagtaaggtcctgaatctcatgaaggtctactaacttgttgaattgctgaaccaattttccaatcgactcgtcgtttccaggaatgacagttgtgatacgagaaagaccctccttttcagcagggcctacagcaagac

SEQ ID NO: 2711 - DNA, 200 bp, Amaranthus viridis
aatagctgcaaatactacagccaggagagatgtccttgatattgctaatattttccgtgcaaaagctgtggatgtttcggatcacacgataacattacagcttgcgggtgatttacacaaaatggttgcgctacaaagattattggagccttatggcatttgtgaggtggcacggacaggaagagtcgcactgagtagag

SEQ ID NO: 2712 - DNA, 200 bp, Amaranthus viridis
ctctactcagtgcgactcttcctgtccgtgccacctcacaaatgccataaggctccaataatctttgtagcgcaaccattttgtgtaaatcacccgcaagctgtaatgttatcgtgtgatccgaaacatccacagcttttgcacggaaaatattagcaatatcaaggacatctctcctggctgtagtatttgcagctatt

SEQ ID NO: 2713 - DNA, 200 bp, Amaranthus viridis
gaagatctatctagagagcctcaagtggaacgttgagcttatgctattaaagcttcattctaatgcagatacccatgcagagataatgtggttagtggacatcttcagagcaaaaattgtcgatatgtcggaaagcttcgttactgtagaggtgactggtgatcctggaaagatggctgctgtcctgagaaattttagca

SEQ ID NO: 2714 - DNA, 200 bp, Amaranthus viridis
tgctaaaatttctcaggacagcagccatctttccaggatcaccagtcacctctacagtaacgaagctttccgacatatcgacaatttttgctctgaagatgtccactaaccacattatctctgcatgggtatctgcattagaatgaagctttaatagcataagctcaacgttccacttgaggctctctagatagatcttc

SEQ ID NO: 2715 - DNA, 200 bp, Amaranthus viridis
gctgctgtcctgagaaattttagcaagtatggaatcaaagaagttgcaagaacaggaaagattgctctaagacgagaaaggatgggccagacagctcctttttggagattctctgctgcatcttatccagatctacaagaaaaggctgttgaatcttttgtcaggcctgccaaaagaaacatcaacgctgatcctggctc

SEQ ID NO: 2716 - DNA, 200 bp, Amaranthus viridis
gagccaggatcagcgttgatgtttcttttggcaggcctgacaaaagattcaacagccttttcttgtagatctggataagatgcagcagagaatctccaaaaaggagctgtctggcccatcctttctcgtcttagagcaatctttcctgttcttgcaacttctttgattccatacttgctaaaatttctcaggacagcagc

SEQ ID NO: 2717 - DNA, 200 bp, Amaranthus viridis
gaaacatcaacgctgatcctggctcatcgtctagtggtgatgtttatccagtggagccttatgaagcctccataaatacagtacttgatgctcactggggcgttctttacgaaaatgattcaagcggacttgtatcacatactctgtccatgctggtaaataatgctcctggagttctgaacaccgttacaggagtaatt

SEQ ID NO: 2718 - DNA, 200 bp, Amaranthus viridis
aattactcctgtaacggtgttcagaactccaggagcattatttaccagcatggacagagtatgtgatacaagtccgcttgaatcattttcgtaaagaacgccccagtgagcatcaagtactgtatttatggaggcttcataaggctccactggataaacatcaccactagacgatgagccaggatcagcgttgatgtttc

SEQ ID NO: 2719 - DNA, 200 bp, Amaranthus viridis
tctgaacaccgttacaggagtaattgctcgtagaggttataacattcagagtcttgctgtgggccctgctgaaaaggagggtctttctcgtatcacaactgttgttcctggaaacgacgagtcaattgcaaaattggttcagcaattaaacaaattagtagaccttcatgagattcaggaccttacgcaccagccatttg

SEQ ID NO: 2720 - DNA, 200 bp, Amaranthus viridis
caaatggctggtgcgtaaggtcctgaatctcatgaaggtctactaatttgtttaattgctgaaccaattttgcaattgactcgtcgtttccaggaacaacagttgtgatacgagaaagaccctccttttcagcagggcccacagcaagactctgaatgttataacctctacgagcaattactcctgtaacggtgttcaga

SEQ ID NO: 2721 - DNA, 200 bp, Amaranthus viridis
caggaccttacgcaccagccatttgcagagcgagagcttatgttaattaaagtagcggcaaatacttctgccaggagagacgtccttgatattgctaatattttccgtgcgaaacctgtggatgtttctgatcacacaataacattacaacttgctggtgatttagacaaaatggttgcgctacagagattattggagcc

SEQ ID NO: 2722 - DNA, 200 bp, Amaranthus viridis
ggctccaataatctctgtagcgcaaccattttgtctaaatcaccagcaagttgtaatgttattgtgtgatcagaaacatccacaggtttcgcacggaaaatattagcaatatcaaggacgtctctcctggcagaagtatttgccgctactttaattaacataagctctcgctctgcaaatggctggtgcgtaaggtcctg

SEQ ID NO: 2723 - DNA, 200 bp, Amaranthus viridis
ttgcgctacagagattattggagccttacggcatttgtgaggtggcacggactggaagagtagcactaacgagagagtctagggtagattccaaatatctacgaggatacactcttccgttgtatgaatgaaaaactcgggctatgtctttccgacattaccttgtctgattccttccgctcttctacactgcattgcaa

SEQ ID NO: 2724 - DNA, 200 bp, Amaranthus viridis
ttgcaatgcagtgtagaagagcggaaggaatcagacaaggtaatgtcggaaagacatagcccgagtttttcattcatacaacggaagagtgtatcctcgtagatatttggaatctaccctagactctctcgttagtgctactcttccagtccgtgccacctcacaaatgccgtaaggctccaataatctctgtagcgcaa

SEQ ID NO: 2725 - DNA, 200 bp, Amaranthus viridis
tccgctcttctacactgcattgcaagcagaacaattgcccacaagtggagtaaattaaaaggggaaacaacaataccgatctttgctttgaagatatactgatttgtataacaatagagtttgtatttgactagtatttatttgctcaacgctgtaataacatatccccttgaggtttgatatatggaaggaaaaattac

SEQ ID NO: 2726 - DNA, 200 bp, Amaranthus viridis
gtaatttttccttccatatatcaaacctcaaggggatatgttattacagcgttgagcaaataaatactagtcaaatacaaactctattgttatacaaatcagtatatcttcaaagcaaagatcggtattgttgtttccccttttaatttactccacttgtgggcaattgttctgcttgcaatgcagtgtagaagagcgga

SEQ ID NO: 2727 - DNA, 200 bp, Amaranthus viridis; identical to SEQ ID NO: 2713

SEQ ID NO: 2728 - DNA, 200 bp, Amaranthus viridis; identical to SEQ ID NO: 2714

SEQ ID NO: 2729 - DNA, 200 bp, Amaranthus viridis; identical to SEQ ID NO: 2715

SEQ ID NO: 2730 - DNA, 200 bp, Amaranthus viridis; identical to SEQ ID NO: 2716

SEQ ID NO: 2731 - DNA, 200 bp, Amaranthus viridis; identical to SEQ ID NO: 2717

SEQ ID NO: 2732 - DNA, 200 bp, Amaranthus viridis; identical to SEQ ID NO: 2718

SEQ ID NO: 2733 - DNA, 200 bp, Amaranthus viridis
tctgaacaccgttacaggagtaatttctcgtaggggttataacattcagagtcttgctgtaggccctgctgaaaaggagggtctttctcgtatcacaactgtcattcctggaaacgacgagtcgattggaaaattggttcagcaattcaacaagttagtagaccttcatgagattcaggaccttactcaccagccatttt

SEQ ID NO: 2734 - DNA, 200 bp, Amaranthus viridis
aaaatggctggtgagtaaggtcctgaatctcatgaaggtctactaacttgttgaattgctgaaccaattttccaatcgactcgtcgtttccaggaatgacagttgtgatacgagaaagaccctccttttcagcagggcctacagcaagactctgaatgttataacccctacgagaaattactcctgtaacggtgttcaga

SEQ ID NO: 2735 - DNA, 200 bp, Amaranthus viridis
caggaccttactcaccagccattttcagagcgagagcttatgttgatcaaaatagctgcaaatactacagccaggagagatgtccttgatattgctaatattttccgtgcaaaagctgtggatgtttcggatcacacgataacattacagcttgcgggtgatttacacaaaatggttgcgctacaaagattattggagcc

SEQ ID NO: 2736 - DNA, 200 bp, Amaranthus viridis
ggctccaataatctttgtagcgcaaccattttgtgtaaatcacccgcaagctgtaatgttatcgtgtgatccgaaacatccacagcttttgcacggaaaatattagcaatatcaaggacatctctcctggctgtagtatttgcagctattttgatcaacataagctctcgctctgaaaatggctggtgagtaaggtcctg

SEQ ID NO: 2737 - DNA, 200 bp, Amaranthus viridis
ttgcgctacaaagattattggagccttatggcatttgtgaggtggcacggacaggaagagtcgcactgagtagagagtctggggtcgattctacatctttacgtggatacgctcttcctttgtacgaataaaaattctccggctatgtcttttcgtcattattatgtcccatttccttcagcacgtctgcgctacattta

SEQ ID NO: 2738 - DNA, 200 bp, Amaranthus viridis
taaatgtagcgcagacgtgctgaaggaaatgggacataataatgacgaaaagacatagccggagaatttttattcgtacaaaggaagagcgtatccacgtaaagatgtagaatcgaccccagactctctactcagtgcgactcttcctgtccgtgccacctcacaaatgccataaggctccaataatctttgtagcgcaa

SEQ ID NO: 2739 - DNA, 200 bp, Amaranthus viridis; identical to SEQ ID NO: 2713

SEQ ID NO: 2740 - DNA, 200 bp, Amaranthus viridis; identical to SEQ ID NO: 2714

SEQ ID NO: 2741 - DNA, 200 bp, Amaranthus viridis
gctgctgtcctgagaaattttagcaagtatggaatcaaagaagttgcaagaacaggaaagattgctctaagacgagaaaggatgggccagacagctcctttttggagattctctgctgcatcttatccagatctacaagaaaaggctgttgatgatctggccaggcctacgaaacggagcatcaatggtgattctggctc

SEQ ID NO: 2742 - DNA, 200 bp, Amaranthus viridis
gagccagaatcaccattgatgctccgtttcgtaggcctggccagatcatcaacagccttttcttgtagatctggataagatgcagcagagaatctccaaaaaggagctgtctggcccatcctttctcgtcttagagcaatctttcctgttcttgcaacttctttgattccatacttgctaaaatttctcaggacagcagc

SEQ ID NO: 2743 - DNA, 200 bp, Amaranthus viridis
ggagcatcaatggtgattctggctcatcttcaagtggtgatgtttatccggtggaaccttatgatggttcgatggtaaatcaagtacttgatgctcactggggcgtactttatgacggtgattcaagtggtctccggtcacatactctgtccatgctggtaaataatgctcctggagttctgaacaccgttacaggagta

SEQ ID NO: 2744 - DNA, 200 bp, Amaranthus viridis
tactcctgtaacggtgttcagaactccaggagcattatttaccagcatggacagagtatgtgaccggagaccacttgaatcaccgtcataaagtacgccccagtgagcatcaagtacttgatttaccatcgaaccatcataaggttccaccggataaacatcaccacttgaagatgagccagaatcaccattgatgctcc

SEQ ID NO: 2745 - DNA, 200 bp, Amaranthus viridis
agttctgaacaccgttacaggagtaattgctcgtagaggttataacattcagagtcttgctgtgggccctgctgaaaaggagggtctttctcgtatcacaactgttgttcctggaaacgacgagtcaattgcaaaattggttcagcaattaaacaaattagtagaccttcatgagattcaggaccttacgcaccagccat

SEQ ID NO: 2746 - DNA, 200 bp, Amaranthus viridis
atggctggtgcgtaaggtcctgaatctcatgaaggtctactaatttgtttaattgctgaaccaattttgcaattgactcgtcgtttccaggaacaacagttgtgatacgagaaagaccctccttttcagcagggcccacagcaagactctgaatgttataacctctacgagcaattactcctgtaacggtgttcagaact

SEQ ID NO: 2747 - DNA, 200 bp, Amaranthus viridis
attcaggaccttacgcaccagccatttgcagagcgagagcttatgttaattaaagtagcggcaaatacttctgccaggagagacgtccttgatattgctaatattttccgtgcgaaacctgtggatgtttctgatcacacaataacattacaacttgctggtgatttagacaaaatggttgcgctacagagattattgga

SEQ ID NO: 2748 - DNA, 200 bp, Amaranthus viridis
tccaataatctctgtagcgcaaccattttgtctaaatcaccagcaagttgtaatgttattgtgtgatcagaaacatccacaggtttcgcacggaaaatattagcaatatcaaggacgtctctcctggcagaagtatttgccgctactttaattaacataagctctcgctctgcaaatggctggtgcgtaaggtcctgaat

SEQ ID NO: 2749 - DNA, 200 bp, Amaranthus viridis
tggttgcgctacagagattattggagccttacggcatttgtgaggtggcacggactggaagagtagcactaacgagagagtctagggtagattccaaatatctacgaggatacactcttccgttgtatgaatgaaaaactcgggctatgtctttccgacattaccttgtctgattccttccgctcttctacactgcattg

SEQ ID NO: 2750 - DNA, 200 bp, Amaranthus viridis
caatgcagtgtagaagagcggaaggaatcagacaaggtaatgtcggaaagacatagcccgagtttttcattcatacaacggaagagtgtatcctcgtagatatttggaatctaccctagactctctcgttagtgctactcttccagtccgtgccacctcacaaatgccgtaaggctccaataatctctgtagcgcaacca

SEQ ID NO: 2751 - DNA, 200 bp, Amaranthus viridis
ccttccgctcttctacactgcattgcaagcagaacaattgcccacaagtggagtaaattaaaaggggaaacaacaataccgatctttgctttgaagatatactgatttgtataacaatagagtttgtatttgactagtatttatttgctcaacgctgtaataacatatccccttgaggtttgatatatggaaggaaaaat

SEQ ID NO: 2752 - DNA, 200 bp, Amaranthus viridis
atttttccttccatatatcaaacctcaaggggatatgttattacagcgttgagcaaataaatactagtcaaatacaaactctattgttatacaaatcagtatatcttcaaagcaaagatcggtattgttgtttccccttttaatttactccacttgtgggcaattgttctgcttgcaatgcagtgtagaagagcggaagg

SEQ ID NO: 2753 - DNA, 200 bp, Amaranthus viridis
gtctttctttgcaccctggttgtcctcgtcaggccgagttagctgtgtttcaaatttccatccatggaggctgtgtcgactcacctttcaacgagttttaactccattccgaaaagcaatagattgaaccaccaaactgcaaaacgattagggttctccttgaaaccccattctctgggttttaagtttaactccaatag

SEQ ID NO: 2754 - DNA, 200 bp, Amaranthus viridis
ctattggagttaaacttaaaacccagagaatggggtttcaaggagaaccctaatcgttttgcagtttggtggttcaatctattgcttttcggaatggagttaaaactcgttgaaaggtgagtcgacacagcctccatggatggaaatttgaaacacagctaactcggcctgacgaggacaaccagggtgcaaagaaagac

SEQ ID NO: 2755 - DNA, 200 bp, Amaranthus viridis
tgggttttaagtttaactccaatagtgacaggaattcggagtttgataaactggttgtatctgcaagcaatgttgatcaactgggaaatcaaagtaacttatcctttaatcccccttctccctctcgatcaaaggagagacgacatacaatatcagtatttgtgggggatgaaagtggaatgattaatcgaatagcaggg

SEQ ID NO: 2756 - DNA, 200 bp, Amaranthus viridis
ccctgctattcgattaatcattccactttcatcccccacaaatactgatattgtatgtcgtctctcctttgatcgagagggagaagggggattaaaggataagttactttgatttcccagttgatcaacattgcttgcagatacaaccagtttatcaaactccgaattcctgtcactattggagttaaacttaaaaccca

SEQ ID NO: 2757 - DNA, 200 bp, Amaranthus viridis
tggaatgattaatcgaatagcaggggtttttgccagaagaggttataatatcgaatcactcgctgttggattgaacaaggacaaagctctcttcactattgtagtttctggaacggataatgtgttgcagcaagtgatggaacagcttcaaaagcttgtcaatgttttgaaggttgaagatatatccaaggagcctcaag

SEQ ID NO: 2758 - DNA, 200 bp, Amaranthus viridis
cttgaggctccttggatatatcttcaaccttcaaaacattgacaagcttttgaagctgttccatcacttgctgcaacacattatccgttccagaaactacaatagtgaagagagctttgtccttgttcaatccaacagcgagtgattcgatattataacctcttctggcaaaaacccctgctattcgattaatcattcca

SEQ ID NO: 2759 - DNA, 200 bp, Amaranthus viridis
gaagatatatccaaggagcctcaagtagaacgtgaattgatgcttgtaaaagttggagctgatcggaataaccgtgctgagctgatgtggttggtggacatctttcgtgccaaaattgtggacatatcggaagagtatctttcaatagaggtcactggagatccaggaaagatggttgctgtccttagaaacctaagcaa

SEQ ID NO: 2760 - DNA, 200 bp, Amaranthus viridis
ttgcttaggtttctaaggacagcaaccatctttcctggatctccagtgacctctattgaaagatactcttccgatatgtccacaattttggcacgaaagatgtccaccaaccacatcagctcagcacggttattccgatcagctccaacttttacaagcatcaattcacgttctacttgaggctccttggatatatcttc

SEQ ID NO: 2761 - DNA, 200 bp, Amaranthus viridis
ttgctgtccttagaaacctaagcaagtttggcatcaaagaaattgctcgtaccggaaagattgctctaagaagggaaaaattgggcgagtctgctcctttctggcgtttttctgctgcttcttatcctgatcttgaagaagctatccctatggatgctctttctggagtttcaaaaggggcagctgctgctggatcatcg

SEQ ID NO: 2762 - DNA, 200 bp, Amaranthus viridis
cgatgatccagcagcagctgccccttttgaaactccagaaagagcatccatagggatagcttcttcaagatcaggataagaagcagcagaaaaacgccagaaaggagcagactcgcccaatttttcccttcttagagcaatctttccggtacgagcaatttctttgatgccaaacttgcttaggtttctaaggacagcaa

SEQ ID NO: 2763 - DNA, 200 bp, Amaranthus viridis
aggggcagctgctgctggatcatcggattcgtctgtggagggtgatgtttatcctgtggagccgtttgatggtttctcccttccaatcttagatgctcattggggtattttgaacgaagaagatactagtgggatgcggtcacacactctatctattcttgttaatgacaaacctggggtccttaatgttgttacggggg

SEQ ID NO: 2764 - DNA, 200 bp, Amaranthus viridis
cccccgtaacaacattaaggaccccaggtttgtcattaacaagaatagatagagtgtgtgaccgcatcccactagtatcttcttcgttcaaaataccccaatgagcatctaagattggaagggagaaaccatcaaacggctccacaggataaacatcaccctccacagacgaatccgatgatccagcagcagctgcccct

SEQ ID NO: 2765 - DNA, 200 bp, Amaranthus viridis
ggggtccttaatgttgttacgggggtttttgctcgaaggggttataacattcagagtttagctgtgggtcatgcggaaggtgagggtctatctcgtatcactactgttgtacccggtacagatgaatcaattagcaaattggttcaacaaatctacaagctggttgatattcatgaggttagagatcttacccattatcc

SEQ ID NO: 2766 - DNA, 200 bp, Amaranthus viridis
ggataatgggtaagatctctaacctcatgaatatcaaccagcttgtagatttgttgaaccaatttgctaattgattcatctgtaccgggtacaacagtagtgatacgagatagaccctcaccttccgcatgacccacagctaaactctgaatgttataaccccttcgagcaaaaacccccgtaacaacattaaggacccc

SEQ ID NO: 2767 - DNA, 200 bp, Amaranthus viridis
aggttagagatcttacccattatccatttgctgagcgagagttgatgttgataaaagtagctgtgaatactgctgcacgtcgtgaggtcctagacgttgccagcatttttagagcaaaagctgttgatgtatctgatcacaccataacacttgagctcactggagatttgaacaagatggttgctctacagagattgctc

SEQ ID NO: 2768 - DNA, 200 bp, Amaranthus viridis
gagcaatctctgtagagcaaccatcttgttcaaatctccagtgagctcaagtgttatggtgtgatcagatacatcaacagcttttgctctaaaaatgctggcaacgtctaggacctcacgacgtgcagcagtattcacagctacttttatcaacatcaactctcgctcagcaaatggataatgggtaagatctctaacct

SEQ ID NO: 2769 - DNA, 200 bp, Ambrosia trifida
aaaatttctatgttttatgttgtgatgaatatatggtctataatgtatttatgctttatgttgtggtgaatataatcttgatgtcatgcttttgttattcagggtgaggcgccacacgatttcagtatttgttggtgatgaaagtggaatgataaatcggattgcaggagtttttgcaaggaggggatataatatcgagt

SEQ ID NO: 2770 - DNA, 200 bp, Ambrosia trifida
actcgatattatatcccctccttgcaaaaactcctgcaatccgatttatcattccactttcatcaccaacaaatactgaaatcgtgtggcgcctcaccctgaataacaaaagcatgacatcaagattatattcaccacaacataaagcataaatacattatagaccatatattcatcacaacataaaacatagaaatttt

SEQ ID NO: 2771 - DNA, 200 bp, Ambrosia trifida
gcaaggaggggatataatatcgagtcccttgctgttggtttaaacaaggataaggctctttttactatagttgtatcgggaactgaaagagtgttggagcaagttatgaaacaacttctaaagctcgttaatgttttaaaggttggcttttattctgatggttgattcatcatattgtctattttttatactttacttat

SEQ ID NO: 2772 - DNA, 200 bp, Ambrosia trifida
ataagtaaagtataaaaaatagacaatatgatgaatcaaccatcagaataaaagccaacctttaaaacattaacgagctttagaagttgtttcataacttgctccaacactctttcagttcccgatacaactatagtaaaaagagccttatccttgtttaaaccaacagcaagggactcgatattatatcccctccttgc

SEQ ID NO: 2773 - DNA, 200 bp, Ambrosia trifida
tgtctattttttatactttacttatatcaaccatttttaataggttgaagatatctcaaaggagccacaagtagaacgtgagttgatgctcatcaagataaatgcagatccaagataccgtttggaggtgtttaactaattattttatgatcttcatgttttggttaattacggttatttatattatacctaagtactgc

SEQ ID NO: 2774 - DNA, 200 bp, Ambrosia trifida
gcagtacttaggtataatataaataaccgtaattaaccaaaacatgaagatcataaaataattagttaaacacctccaaacggtatcttggatctgcatttatcttgatgagcatcaactcacgttctacttgtggctcctttgagatatcttcaacctattaaaaatggttgatataagtaaagtataaaaaatagaca

SEQ ID NO: 2775 - DNA, 200 bp, Ambrosia trifida
tatttatattatacctaagtactgcaatgaaccgttcttataattgcaatgaacacatgcaatcaaatattcaaatatagctaaccatttttagcctaaggatatgctatctaaccatgttcttttgtgattctaattttcaggtcaagtggttagtggacatatttagagctagaattgttgatatttcagagcactct

SEQ ID NO: 2776 - DNA, 200 bp, Ambrosia trifida
agagtgctctgaaatatcaacaattctagctctaaatatgtccactaaccacttgacctgaaaattagaatcacaaaagaacatggttagatagcatatccttaggctaaaaatggttagctatatttgaatatttgattgcatgtgttcattgcaattataagaacggttcattgcagtacttaggtataatataaata

SEQ ID NO: 2777 - DNA, 200 bp, Ambrosia trifida
aattgttgatatttcagagcactctataactattgaggtgacgggagtcgaactttttctatagctttatttataattcttcacgcatcatctaggagtgagtttggatcttaatggattgaattgtttatgctattatagggcctttgctaatttgcatatgttcacaaccttatttattagaatttagatataagggt

SEQ ID NO: 2778 - DNA, 200 bp, Ambrosia trifida
acccttatatctaaattctaataaataaggttgtgaacatatgcaaattagcaaaggccctataatagcataaacaattcaatccattaagatccaaactcactcctagatgatgcgtgaagaattataaataaagctatagaaaaagttcgactcccgtcacctcaatagttatagagtgctctgaaatatcaacaatt

SEQ ID NO: 2779 - DNA, 200 bp, Ambrosia trifida
aaattaattttgggttttttacacttctagttttattctttataaaatttctatgttttatgttgtgatgaatatatggtctataatgtatttatgctttatgttgtggtgaatttaatcttgatgtcatgcttttgttattcagggtgaggcgccacacgatttccgtatttgttggtgatgaaagtggaatgataaat

SEQ ID NO: 2780 - DNA, 200 bp, Ambrosia trifida
atttatcattccactttcatcaccaacaaatacggaaatcgtgtggcgcctcaccctgaataacaaaagcatgacatcaagattaaattcaccacaacataaagcataaatacattatagaccatatattcatcacaacataaaacatagaaattttataaagaataaaactagaagtgtaaaaaacccaaaattaattt

SEQ ID NO: 2781 - DNA, 200 bp, Ambrosia trifida
tggtgatgaaagtggaatgataaatcggattgcaggagtttttgcaaggaggggatataatatcgagtcccttgctgttggtttaaacaaggataaggctctttttactatagttgtatcgggaactgaaagagtgttggagcaagttatgaaacaacttctaaagctcgttaatgttttaaaggttggcttttattctg

SEQ ID NO: 2782 - DNA, 200 bp, Ambrosia trifida
cagaataaaagccaacctttaaaacattaacgagctttagaagttgtttcataacttgctccaacactctttcagttcccgatacaactatagtaaaaagagccttatccttgtttaaaccaacagcaagggactcgatattatatcccctccttgcaaaaactcctgcaatccgatttatcattccactttcatcacca

SEQ ID NO: 2783 - DNA, 200 bp, Ambrosia trifida
cctttgtcgggaaaaccataatgacgaaaacagccaccatttcttctctctcctcggcggctcattgccgccgccacaccatacaaccggtgacactacaacccacaaacctaaaaccattcaataaaaaatgttcagctccttacactctaaaaccacttaatgctatctctgacaacaaatctccggccacattgcca

SEQ ID NO: 2784 - DNA, 200 bp, Ambrosia trifida
tggcaatgtggccggagatttgttgtcagagatagcattaagtggttttagagtgtaaggagctgaacattttttattgaatggttttaggtttgtgggttgtagtgtcaccggttgtatggtgtggcggcggcaatgagccgccgaggagagagaagaaatggtggctgttttcgtcattatggttttcccgacaaagg

SEQ ID NO: 2785 - DNA, 200 bp, Ambrosia trifida
caacaaatctccggccacattgccacatattcttccccttaacacaccacttacttccaaggtgaagcgtcacacgatctcggtgtttgttggggatgaaagtggtattataaatcgaattgcgggggtgtttgctagacgaggttataatatcgagtcgcttgcggttggtttgaataaggataaggctttgtttacta

SEQ ID NO: 2786 - DNA, 200 bp, Ambrosia trifida
tagtaaacaaagccttatccttattcaaaccaaccgcaagcgactcgatattataacctcgtctagcaaacacccccgcaattcgatttataataccactttcatccccaacaaacaccgagatcgtgtgacgcttcaccttggaagtaagtggtgtgttaaggggaagaatatgtggcaatgtggccggagatttgttg

SEQ ID NO: 2787 - DNA, 200 bp, Ambrosia trifida
aataaggataaggctttgtttactattgttgtctctgggactgagaaggtgttgcagcaagttgtagagcaacttaacaagcttgttaatgtcttgaaggtggaagatctttctcgggatccgcaagtagagcgggaattgatgcttgtgaagcttaatgttgatccaagcacaaaagctgagattatgtggttagtaga

SEQ ID NO: 2788 - DNA, 200 bp, Ambrosia trifida
tctactaaccacataatctcagcttttgtgcttggatcaacattaagcttcacaagcatcaattcccgctctacttgcggatcccgagaaagatcttccaccttcaagacattaacaagcttgttaagttgctctacaacttgctgcaacaccttctcagtcccagagacaacaatagtaaacaaagccttatccttatt

SEQ ID NO: 2789 - DNA, 200 bp, Ambrosia trifida
aagctgagattatgtggttagtagacatctttagaggcaatgtggtggatgcatcggaatcctcattgactatagaggttactggggatcccgggaagatagctgctgttcagaggaatctagctaagtttggaatcaaagaacttacaagaacaggaaagattgcgctaagacgggaaaaaatgggtgaaactgctccg

SEQ ID NO: 2790 - DNA, 200 bp, Ambrosia trifida
cggagcagtttcacccattttttcccgtcttagcgcaatctttcctgttcttgtaagttctttgattccaaacttagctagattcctctgaacagcagctatcttcccgggatccccagtaacctctatagtcaatgaggattccgatgcatccaccacattgcctctaaagatgtctactaaccacataatctcagctt

SEQ ID NO: 2791 - DNA, 200 bp, Ambrosia trifida
ggaaaaaatgggtgaaactgctccgttttggaacttctctgcagcatcttatccagatctagaagccctgggtcctgttgctagtattactaaagtggttgacgagactcctagtacaacgtcaggggggggcgatgtttatcctgtggattcctacgatagctgctacgtaagggatcgagttctcgatgccaattggg

SEQ ID NO: 2792 - DNA, 200 bp, Ambrosia trifida
cccaattggcatcgagaactcgatcccttacgtagcagctatcgtaggaatccacaggataaacatcgcccccccctgacgttgtactaggagtctcgtcaaccactttagtaatactagcaacaggacccagggcttctagatctggataagatgctgcagagaagttccaaaacggagcagtttcacccattttttcc

SEQ ID NO: 2793 - DNA, 200 bp, Ambrosia trifida
gatcgagttctcgatgccaattggggcgtgctatatgacgaagatgcaacgggtcgtcaatctcacactttgaacattcttgtgaataatgctcctggagttctcaacctggtcaccggagttatatccagacggggttataacgttcagagtctggctgtaggtcctgcagaactggaaggtttatctcgcattactac

SEQ ID NO: 2794 - DNA, 200 bp, Ambrosia trifida
gtagtaatgcgagataaaccttccagttctgcaggacctacagccagactctgaacgttataaccccgtctggatataactccggtgaccaggttgagaactccaggagcattattcacaagaatgttcaaagtgtgagattgacgacccgttgcatcttcgtcatatagcacgccccaattggcatcgagaactcgatc

SEQ ID NO: 2795 - DNA, 200 bp, Ambrosia trifida
tggaaggtttatctcgcattactactgtgattgccggcacagacgagtctattggcaagttggttcagcagttctacaaattgatagatgttcatgaggtcaaagatatcacctacttaccattttcggaacgcgagttaatgctgatcaaagttgctgcaagccctgctgctagaagggatgtattggacattgccacc

SEQ ID NO: 2796 - DNA, 200 bp, Ambrosia trifida
ggtggcaatgtccaatacatcccttctagcagcagggcttgcagcaactttgatcagcattaactcgcgttccgaaaatggtaagtaggtgatatctttgacctcatgaacatctatcaatttgtagaactgctgaaccaacttgccaatagactcgtctgtgccggcaatcacagtagtaatgcgagataaaccttcca

SEQ ID NO: 2797 - DNA, 200 bp, Ambrosia trifida
aagggatgtattggacattgccaccatcttccgcgccaagcctgttgatgtttctgaccatactattacgctagaactcaccggagacttcaataagctattcgccctgcaaacgttattggagacctatggaatttgcgaggtcgcaaggactggtcgagtggcattggttagagagtcaggagtcgattctacatatc

SEQ ID NO: 2798 - DNA, 200 bp, Ambrosia trifida
gatatgtagaatcgactcctgactctctaaccaatgccactcgaccagtccttgcgacctcgcaaattccataggtctccaataacgtttgcagggcgaatagcttattgaagtctccggtgagttctagcgtaatagtatggtcagaaacatcaacaggcttggcgcggaagatggtggcaatgtccaatacatccctt

SEQ ID NO: 2799 - DNA, 200 bp, Ambrosia trifida
ctacctactccgccataatccacactcaaagagcaccttcttcttcttcctaatctacttccatcacccaaacctctagaccgtacaccgaccagtttctctccaacactctcttcaaatcctaacaaaccttatctcaaatcactctctgtgcaagcaaccagtgcttccgtttccaccgcccttgatgccactccatc

SEQ ID NO: 2800 - DNA, 200 bp, Ambrosia trifida
gatggagtggcatcaagggcggtggaaacggaagcactggttgcttgcacagagagtgatttgagataaggtttgttaggatttgaagagagtgttggagagaaactggtcggtgtacggtctagaggtttgggtgatggaagtagattaggaagaagaagaaggtgctctttgagtgtggattatggcggagtaggtag

SEQ ID NO: 2801 - DNA, 200 bp, Ambrosia trifida
ccaccgcccttgatgccactccatccatggcaagacctaaggtgaggcgccacacgatttcagtatttgttggtgatgaaagtggaatgataaatcggattgcaggagtttttgcaaggaggggatataatatcgagtcccttgctgttggtttaaacaaggataaggctctttttactatagttgtatcgggaactgaa

SEQ ID NO: 2802 - DNA, 200 bp, Ambrosia trifida
ttcagttcccgatacaactatagtaaaaagagccttatccttgtttaaaccaacagcaagggactcgatattatatcccctccttgcaaaaactcctgcaatccgatttatcattccactttcatcaccaacaaatactgaaatcgtgtggcgcctcaccttaggtcttgccatggatggagtggcatcaagggcggtgg

SEQ ID NO: 2803 - DNA, 200 bp, Ambrosia trifida
tactatagttgtatcgggaactgaaagagtgttggagcaagttatgaaacaacttctaaagctcgttaatgttttaaaggttgaagatatctcaaaggagccacaagtagaacgtgagttgatgctcatcaagataaatgcagatccaagataccgtttggaggtcaagtggttagtggacatatttagagctagaattg

SEQ ID NO: 2804 - DNA, 200 bp, Ambrosia trifida
caattctagctctaaatatgtccactaaccacttgacctccaaacggtatcttggatctgcatttatcttgatgagcatcaactcacgttctacttgtggctcctttgagatatcttcaacctttaaaacattaacgagctttagaagttgtttcataacttgctccaacactctttcagttcccgatacaactatagta

SEQ ID NO: 2805 - DNA, 200 bp, Ambrosia trifida
gtggacatatttagagctagaattgttgatatttcagagcactctataactattgaggtaactggtgacccagggaaaatggttgcggtgcaaagaaatttaagcaagtttgggatccaagaagttgctaggaccgggaagattgccttgagaagagaaagaatgggtgaagatgctcctttctggcggttttcagcagc

SEQ ID NO: 2806 - DNA, 200 bp, Ambrosia trifida
gctgctgaaaaccgccagaaaggagcatcttcacccattctttctcttctcaaggcaatcttcccggtcctagcaacttcttggatcccaaacttgcttaaatttctttgcaccgcaaccattttccctgggtcaccagttacctcaatagttatagagtgctctgaaatatcaacaattctagctctaaatatgtccac

SEQ ID NO: 2807 - DNA, 200 bp, Ambrosia trifida
ctcctttctggcggttttcagcagcttcatatcctgaccttgaagaaatgaacaaaagaactcctcttcaagccaaaaagagaacagagtatcaggaatctgataagcctgctgggggagatgtttatccagtagattcatctgatgattattcattcaatcaagttcttgatgcacattggggtgttcttaatgaagaa

SEQ ID NO: 2808 - DNA, 200 bp, Ambrosia trifida
ttcttcattaagaacaccccaatgtgcatcaagaacttgattgaatgaataatcatcagatgaatctactggataaacatctcccccagcaggcttatcagattcctgatactctgttctctttttggcttgaagaggagttcttttgttcatttcttcaaggtcaggatatgaagctgctgaaaaccgccagaaaggag

SEQ ID NO: 2809 - DNA, 200 bp, Ambrosia trifida
acattggggtgttcttaatgaagaagatacaagcgggcttcgttcccacactttatcaatcgttgtaaatgactctcctggagttctcaatatcgtaacaggagtttttgctcgcagaggctataatattcagagtctagcagtcggtcatgcagaagtagaggggcgttcccgcatcacaactgttgtccctggtacag

SEQ ID NO: 2810 - DNA, 200 bp, Ambrosia trifida
ctgtaccagggacaacagttgtgatgcgggaacgcccctctacttctgcatgaccgactgctagactctgaatattatagcctctgcgagcaaaaactcctgttacgatattgagaactccaggagagtcatttacaacgattgataaagtgtgggaacgaagcccgcttgtatcttcttcattaagaacaccccaatgt

SEQ ID NO: 2811 - DNA, 200 bp, Ambrosia trifida
atcacaactgttgtccctggtacagatgagtcaattgcaaagttggttcaacaactatacaagttgatagatgtgcatgatgttgtggatttaacgttgatgccatttgccgaacgagaattgatgctgattaagattgctgtgaattccacggcccggcgcaatgttcttgatattgcaagcatatttagggctaaagc

SEQ ID NO: 2812 - DNA, 200 bp, Ambrosia trifida
gctttagccctaaatatgcttgcaatatcaagaacattgcgccgggccgtggaattcacagcaatcttaatcagcatcaattctcgttcggcaaatggcatcaacgttaaatccacaacatcatgcacatctatcaacttgtatagttgttgaaccaactttgcaattgactcatctgtaccagggacaacagttgtgat

SEQ ID NO: 2813 - DNA, 200 bp, Ambrosia trifida
ttgcaagcatatttagggctaaagccgtagacgtgtcagatcatacaattacacttgaggttactggagatctgaataagatggttgcactgcagaggttgttggaaccttgcggaatttgtgaggtggcaagaacaggtcgcgtggcactgacccgcgagtcaggcgttgattcctcttaccttcgtggatattcctat

SEQ ID NO: 2814 - DNA, 200 bp, Ambrosia trifida
ataggaatatccacgaaggtaagaggaatcaacgcctgactcgcgggtcagtgccacgcgacctgttcttgccacctcacaaattccgcaaggttccaacaacctctgcagtgcaaccatcttattcagatctccagtaacctcaagtgtaattgtatgatctgacacgtctacggctttagccctaaatatgcttgcaa

SEQ ID NO: 2815 - DNA, 200 bp, Ambrosia trifida
ctcttaccttcgtggatattcctatcctgtgtgatttctatcttttatagcttcttcctgtttcgggtagagattgtcagtaatttgggtgttctttttctatctggtacctagtctaagttgtatgtttttaacaatagatttttgttttttcatccgacttttaagaccctgttttgactctatatgaagttacatac

SEQ ID NO: 2816 - DNA, 200 bp, Ambrosia trifida
gtatgtaacttcatatagagtcaaaacagggtcttaaaagtcggatgaaaaaacaaaaatctattgttaaaaacatacaacttagactaggtaccagatagaaaaagaacacccaaattactgacaatctctacccgaaacaggaagaagctataaaagatagaaatcacacaggataggaatatccacgaaggtaagag

SEQ ID NO: 2817 - DNA, 200 bp, Ambrosia trifida
gggtcctgttgctagtattactaaagtggttgacgagactcctagtacaacgtcaggggtaggttgttaaattttcaggcttccttcgcagcaatcattgttctctaactcggtatatttttatttgaatgaaggggggcgatgtttatcctgtggattcctacgatagctgctacgtaagggatcgagttctcgatgcc

SEQ ID NO: 2818 - DNA, 200 bp, Ambrosia trifida
ggcatcgagaactcgatcccttacgtagcagctatcgtaggaatccacaggataaacatcgccccccttcattcaaataaaaatataccgagttagagaacaatgattgctgcgaaggaagcctgaaaatttaacaacctacccctgacgttgtactaggagtctcgtcaaccactttagtaatactagcaacaggaccc

SEQ ID NO: 2819 - DNA, 200 bp, Ambrosia trifida
cgtaagggatcgagttctcgatgccaattggggcgtgctatatgacgaagatgtaagtcatcgtctcgttactatgtttacgtttcatttctgacacgcaaattaatgctgcaggcaacgggtcgtcaatctcacactttgaacattcttgtgaataatgctcctggagttctcaacctggtcaccggagttatatccag

SEQ ID NO: 2820 - DNA, 200 bp, Ambrosia trifida
ctggatataactccggtgaccaggttgagaactccaggagcattattcacaagaatgttcaaagtgtgagattgacgacccgttgcctgcagcattaatttgcgtgtcagaaatgaaacgtaaacatagtaacgagacgatgacttacatcttcgtcatatagcacgccccaattggcatcgagaactcgatcccttacg

SEQ ID NO: 2821 - DNA, 200 bp, Ambrosia trifida
acctggtcaccggagttatatccagacggggttataacgttcaggtaaattaacttgttttaagcaatccggtccaggcctagctaactttaacggtaattggttgtttgtttgtttgtttacagagtctggctgtaggtcctgcagaactggaaggtttatctcgcattactactgtgattgccggcacagacgagtct

SEQ ID NO: 2822 - DNA, 200 bp, Ambrosia trifida
agactcgtctgtgccggcaatcacagtagtaatgcgagataaaccttccagttctgcaggacctacagccagactctgtaaacaaacaaacaaacaaccaattaccgttaaagttagctaggcctggaccggattgcttaaaacaagttaatttacctgaacgttataaccccgtctggatataactccggtgaccaggt

SEQ ID NO: 2823 - DNA, 200 bp, Ambrosia trifida
tgtgattgccggcacagacgagtctattggcaagttggttcagcagttctacaaattgatagatgttcatgaggtacaaaagtgtccgttatcgttttcactggtatggaaaaattaatgaaatactactcaggtcaaagatatcacctacttgccattttcggaacgcgagttaatgctgatcaaagttgctgcaagcc

SEQ ID NO: 2824 - DNA, 200 bp, Ambrosia trifida
ggcttgcagcaactttgatcagcattaactcgcgttccgaaaatggcaagtaggtgatatctttgacctgagtagtatttcattaatttttccataccagtgaaaacgataacggacacttttgtacctcatgaacatctatcaatttgtagaactgctgaaccaacttgccaatagactcgtctgtgccggcaatcaca

SEQ ID NO: 2825 - DNA, 200 bp, Ambrosia trifida
atgctgatcaaagttgctgcaagccctgctgctagaagggatgtattggacattgccaccatcttccgcgccaagcctgttgatgtttctgaccatactattacgctagaagtaatgtttcttaatccttgtttctttttgtttttcctgtttctgatatcatcttccgtcttctatgttatgttctagctcaccggaga

SEQ ID NO: 2826 - DNA, 200 bp, Ambrosia trifida
tctccggtgagctagaacataacatagaagacggaagatgatatcagaaacaggaaaaacaaaaagaaacaaggattaagaaacattacttctagcgtaatagtatggtcagaaacatcaacaggcttggcgcggaagatggtggcaatgtccaatacatcccttctagcagcagggcttgcagcaactttgatcagcat

SEQ ID NO: 2827 - DNA, 200 bp, Ambrosia trifida
atgttatgttctagctcaccggagacttcaataagctattcgccctgcaaacgttattggagacctatggaatttgcgaggtttgtaacagcataattaattgtttgtttgttggttggtcacagtgcatggttggttacgttatattgtgtgtgtaggtcgcaaggactggtcgagtggcattggttagagagtcagga

SEQ ID NO: 2828 - DNA, 200 bp, Ambrosia trifida
tcctgactctctaaccaatgccactcgaccagtccttgcgacctacacacacaatataacgtaaccaaccatgcactgtgaccaaccaacaaacaaacaattaattatgctgttacaaacctcgcaaattccataggtctccaataacgtttgcagggcgaatagcttattgaagtctccggtgagctagaacataacat

SEQ ID NO: 2829 - DNA, 200 bp, Ambrosia trifida
agtggcattggttagagagtcaggagtcgattctacatatctacgtgggttctctatgcccttgtgatagacgcacaagtccaacttgattcaagccgatccgatggttgcaagggtccccatccggtgggctacttttatgttgcgacatgtaactgttacagttattagtttttattgtttgttagcttaatatgttg

SEQ ID NO: 2830 - DNA, 200 bp, Ambrosia trifida
caacatattaagctaacaaacaataaaaactaataactgtaacagttacatgtcgcaacataaaagtagcccaccggatggggacccttgcaaccatcggatcggcttgaatcaagttggacttgtgcgtctatcacaagggcatagagaacccacgtagatatgtagaatcgactcctgactctctaaccaatgccact

SEQ ID NO: 2831 - DNA, 200 bp, Ambrosia trifida
tattgtttgttagcttaatatgttgaagacagtttctagtaatcatattggtttcacatcagatcagatgctatatatgctaataacttgcaaagttcagatcgcctgcagaaggtaagcgatgagtatttagaccagaccaacttattatacgatatcaacatattaattaatattgccctatcggcaatacattgcat

SEQ ID NO: 2832 - DNA, 200 bp, Ambrosia trifida
atgcaatgtattgccgatagggcaatattaattaatatgttgatatcgtataataagttggtctggtctaaatactcatcgcttaccttctgcaggcgatctgaactttgcaagttattagcatatatagcatctgatctgatgtgaaaccaatatgattactagaaactgtcttcaacatattaagctaacaaacaata

SEQ ID NO: 2833 - DNA, 200 bp, Ambrosia trifida
ttgccctatcggcaatacattgcattttcacttatcgaattctcaggtttctggatttctgccccataacacacatgaactctggacaaaaaataataataataataataattttaacaagttattgccgatttttctagatgctacgttaaatcttcaataaaaaaactaaaggaaaaaaaaatcaaaattgcagctat

SEQ ID NO: 2834 - DNA, 200 bp, Ambrosia trifida
atagctgcaattttgatttttttttcctttagtttttttattgaagatttaacgtagcatctagaaaaatcggcaataacttgttaaaattattattattattattattttttgtccagagttcatgtgtgttatggggcagaaatccagaaacctgagaattcgataagtgaaaatgcaatgtattgccgatagggcaa

SEQ ID NO: 2835 - DNA, 200 bp, Ambrosia trifida
aaaaaaaaatcaaaattgcagctattgagttatctaccccagatccctgccaccgtggaccacgcatgggtgatgcgatgttccacgaatgaatcatttcatgcccttcacaccacatgatcttagactagacggtgtggttatagggtgaaggggcatagagcgacatgtgccaaatctctacccaacctgtccaacgc

SEQ ID NO: 2836 - DNA, 200 bp, Ambrosia trifida
gcgttggacaggttgggtagagatttggcacatgtcgctctatgccccttcaccctataaccacaccgtctagtctaagatcatgtggtgtgaagggcatgaaatgattcattcgtggaacatcgcatcacccatgcgtggtccacggtggcagggatctggggtagataactcaatagctgcaattttgattttttttt

SEQ ID NO: 2837 - DNA, 200 bp, Ambrosia trifida
gggtttggtgtttattttttttaaatatcagagtctagcagtcggtcatgcagaagtagaggggcgttcccgcatcacaactgttgtccctggtacagatgagtcaattgcaaagttggttcaacaactatacaagttgatagatgtgcatgatgtgagtatatatcaccgttggaaattgcttcatttactcgattcac

SEQ ID NO: 2838 - DNA, 200 bp, Ambrosia trifida
gtgaatcgagtaaatgaagcaatttccaacggtgatatatactcacatcatgcacatctatcaacttgtatagttgttgaaccaactttgcaattgactcatctgtaccagggacaacagttgtgatgcgggaacgcccctctacttctgcatgaccgactgctagactctgatatttaaaaaaaataaacaccaaaccc

SEQ ID NO: 2839 - DNA, 200 bp, Ambrosia trifida
aaattgcttcatttactcgattcacgttatgttttaactcagatgagtaaagctaaatgaaattaactaaaaaggaaaaggatcgtaagagtctaaagtctcttgaagtgtatttttaattaataaaacctctaaaatcattttattaattccatgatcatatctgacacttttatttttgtgacaatccagtctgcgca

SEQ ID NO: 2840 - DNA, 200 bp, Ambrosia trifida
tgcgcagactggattgtcacaaaaataaaagtgtcagatatgatcatggaattaataaaatgattttagaggttttattaattaaaaatacacttcaagagactttagactcttacgatccttttcctttttagttaatttcatttagctttactcatctgagttaaaacataacgtgaatcgagtaaatgaagcaattt

SEQ ID NO: 2841 - DNA, 200 bp, Ambrosia trifida
tttttgtgacaatccagtctgcgcaaacaattagctgcattttgctacttgtacccattatgtttagttttttgagatggttcataggtcatttctcagattttgaggttgctccgctgaattttagctaaacaaacgaaaacaaacatatttttgtttgttcaggttgtggatttaacattgatgccatttgccgaacg

SEQ ID NO: 2842 - DNA, 200 bp, Ambrosia trifida
cgttcggcaaatggcatcaatgttaaatccacaacctgaacaaacaaaaatatgtttgttttcgtttgtttagctaaaattcagcggagcaacctcaaaatctgagaaatgacctatgaaccatctcaaaaaactaaacataatgggtacaagtagcaaaatgcagctaattgtttgcgcagactggattgtcacaaaaa

SEQ ID NO: 2843 - DNA, 200 bp, Ambrosia trifida
taacattgatgccatttgccgaacgagaattgatgctgattaagattgctgtgaattccactgcccgacgcaatgttcttgatattgcaagcatatttagggctaaagccgtagatgtgtcagatcatacaattacacttgaggtgaattttattcacttgcagtttattttctgtcaagtgaaaattctaatgcttata

SEQ ID NO: 2844 - DNA, 200 bp, Ambrosia trifida
tataagcattagaattttcacttgacagaaaataaactgcaagtgaataaaattcacctcaagtgtaattgtatgatctgacacatctacggctttagccctaaatatgcttgcaatatcaagaacattgcgtcgggcagtggaattcacagcaatcttaatcagcatcaattctcgttcggcaaatggcatcaatgtta

SEQ ID NO: 2845 - DNA, 200 bp, Ambrosia trifida
tcaagtgaaaattctaatgcttatattttgagtcgtttctagaaaattgctccatttcttcttttggggaaaattccagctagaccaaggacaagtgatgtgctaatctaatcccatgcttgttcacaaaatagaaaccactagtgagactaaccagaagccatcttcatctaaagcccatgcttgttgtttgagtgttt

SEQ ID NO: 2846 - DNA, 200 bp, Ambrosia trifida
aaacactcaaacaacaagcatgggctttagatgaagatggcttctggttagtctcactagtggtttctattttgtgaacaagcatgggattagattagcacatcacttgtccttggtctagctggaattttccccaaaagaagaaatggagcaattttctagaaacgactcaaaatataagcattagaattttcacttga

SEQ ID NO: 2847 - DNA, 200 bp, Ambrosia trifida
ggttactggggatcccgggaagatagctgctgttcagaggaatctagctaagtttggaatcaaagaacttacaagaacaggaaaggtaattgtttaacgactgtttgtttacgatgattggttcttgactgaatttgctgctgcttgtatgtagattgcgctaagacgggaaaaaatgggtgaaactgctccgttttgga

SEQ ID NO: 2848 - DNA, 200 bp, Ambrosia trifida
tccaaaacggagcagtttcacccattttttcccgtcttagcgcaatctacatacaagcagcagcaaattcagtcaagaaccaatcatcgtaaacaaacagtcgttaaacaattacctttcctgttcttgtaagttctttgattccaaacttagctagattcctctgaacagcagctatcttcccgggatccccagtaacc

SEQ ID NO: 2849 - DNA, 200 bp, Ambrosia trifida
atgggtgaaactgctccgttttggaacttctctgcagcatcttatccagatctagaagccctgggtcctgttgctagtattactaaagtggttgacgagactcctagtacaacgtcaggggtaggttgttaaattttcaggcttccttcgcagcaatcattgttctctaactcggtatatttttatttgaatgaaggggg

SEQ ID NO: 2850 - DNA, 200 bp, Ambrosia trifida
cccccttcattcaaataaaaatataccgagttagagaacaatgattgctgcgaaggaagcctgaaaatttaacaacctacccctgacgttgtactaggagtctcgtcaaccactttagtaatactagcaacaggacccagggcttctagatctggataagatgctgcagagaagttccaaaacggagcagtttcacccat

SEQ ID NO: 2851 - DNA, 200 bp, Ambrosia trifida
tatatttttatttgaatgaaggggggcgatgtttatcctgtggattcctacgatagctgctacataagggatcgagttctcgatgccaattggggcgtgctatatgacgaagacgtaagtcatcgtctcgttactatgtttacgtttcatttctgacacgcaaattaatgctgcaggcaacgggtcgtcaatctcacact

SEQ ID NO: 2852 - DNA, 200 bp, Ambrosia trifida
agtgtgagattgacgacccgttgcctgcagcattaatttgcgtgtcagaaatgaaacgtaaacatagtaacgagacgatgacttacgtcttcgtcatatagcacgccccaattggcatcgagaactcgatcccttatgtagcagctatcgtaggaatccacaggataaacatcgccccccttcattcaaataaaaatata

SEQ ID NO: 2853 - DNA, 200 bp, Ambrosia trifida
ggcaacgggtcgtcaatctcacactttgaacattcttgtgaataatgctcctggagttctcaacctggtcaccggagttatatccagacggggttataacgttcaggtaaattaacttgttttaagcaatccggtccaggcctagctaactttaacggtaattggttgtttgtttgtttacagagtctggctgtaggtcc

SEQ ID NO: 2854 - DNA, 200 bp, Ambrosia trifida
ggacctacagccagactctgtaaacaaacaaacaaccaattaccgttaaagttagctaggcctggaccggattgcttaaaacaagttaatttacctgaacgttataaccccgtctggatataactccggtgaccaggttgagaactccaggagcattattcacaagaatgttcaaagtgtgagattgacgacccgttgcc

SEQ ID NO: 2855 - DNA, 200 bp, Ambrosia trifida
gtttacagagtctggctgtaggtcctgcagaactggaaggtttatctcgcattactactgtgattgccggcacagacgagtctattggcaagttggttcagcagttctacaaattgatagatgttcatgaggtacaaaagtgtccgttatcgttttcactggtatggaaaaattaatgaaatactactcaggtcaaagat

SEQ ID NO: 2856 - DNA, 200 bp, Ambrosia trifida
atctttgacctgagtagtatttcattaatttttccataccagtgaaaacgataacggacacttttgtacctcatgaacatctatcaatttgtagaactgctgaaccaacttgccaatagactcgtctgtgccggcaatcacagtagtaatgcgagataaaccttccagttctgcaggacctacagccagactctgtaaac

SEQ ID NO: 2857 - DNA, 200 bp, Ambrosia trifida
atgaaatactactcaggtcaaagatatcacctacttaccattttcggaacgcgagttaatgctgatcaaagttgctgcaagccctgctgctagaagggatgtattggacattgccaccatcttccgcgccaagcctgttgatgtttctgaccatactattacgctagaagtaatgtttcttaatccttgtttctttttgt

SEQ ID NO: 2858 - DNA, 200 bp, Ambrosia trifida
acaaaaagaaacaaggattaagaaacattacttctagcgtaatagtatggtcagaaacatcaacaggcttggcgcggaagatggtggcaatgtccaatacatcccttctagcagcagggcttgcagcaactttgatcagcattaactcgcgttccgaaaatggtaagtaggtgatatctttgacctgagtagtatttcat

SEQ ID NO: 2859 - DNA, 200 bp, Ambrosia trifida
tttcttaatccttgtttctttttgtttttcctgtttctgatatcatcttccgtcttctatgttatgttctagctcaccggagacttcaataagctattcgccctgcaaacgttattggagacctatggaatttgcgaggtttgtaacagcataattaattgtttgtttgttggtaacagtgcatggttggttacgttata

SEQ ID NO: 2860 - DNA, 200 bp, Ambrosia trifida
tataacgtaaccaaccatgcactgttaccaacaaacaaacaattaattatgctgttacaaacctcgcaaattccataggtctccaataacgtttgcagggcgaatagcttattgaagtctccggtgagctagaacataacatagaagacggaagatgatatcagaaacaggaaaaacaaaaagaaacaaggattaagaaa

SEQ ID NO: 2861 - DNA, 200 bp, Ambrosia trifida
acagtgcatggttggttacgttatattgtgtgtgtaggtcgcaaggactggtcgagtggcattggttagagagtcaggagtcgattctacatatctacgtgggttctctatgcctccaacttgattcaagccgatccgatggttgcaagggtccccatccggtgggctacttttatgttgcgacatgtaactgttacagt

SEQ ID NO: 2862 - DNA, 200 bp, Ambrosia trifida
actgtaacagttacatgtcgcaacataaaagtagcccaccggatggggacccttgcaaccatcggatcggcttgaatcaagttggaggcatagagaacccacgtagatatgtagaatcgactcctgactctctaaccaatgccactcgaccagtccttgcgacctacacacacaatataacgtaaccaaccatgcactgt

SEQ ID NO: 2863 - DNA, 200 bp, Ambrosia trifida
tgttgcgacatgtaactgttacagttattagtttttattgtttgttagcttaatatgttgaagacagtttctagtaatcatattggtttcacatcagatcagatgctatatatgctaataacttgcaaagttcagatcgcctgcagaaggtaagcgatgagtatttagaccagaccaacttattatacgatatcaacata

SEQ ID NO: 2864 - DNA, 200 bp, Ambrosia trifida
tatgttgatatcgtataataagttggtctggtctaaatactcatcgcttaccttctgcaggcgatctgaactttgcaagttattagcatatatagcatctgatctgatgtgaaaccaatatgattactagaaactgtcttcaacatattaagctaacaaacaataaaaactaataactgtaacagttacatgtcgcaaca

SEQ ID NO: 2865 - DNA, 200 bp, Ambrosia trifida
caacttattatacgatatcaacatattaattaatattgccctatcggcaatacattgcattttcacttatcgaattctcaggtttctggatttctgccccataacacacatgaactctggacaaaaaataataataataataataataattttaacaagttattgccgatttttctagatgctacgttaaatcttcaata

SEQ ID NO: 2866 - DNA, 200 bp, Ambrosia trifida
tattgaagatttaacgtagcatctagaaaaatcggcaataacttgttaaaattattattattattattattattttttgtccagagttcatgtgtgttatggggcagaaatccagaaacctgagaattcgataagtgaaaatgcaatgtattgccgatagggcaatattaattaatatgttgatatcgtataataagttg

SEQ ID NO: 2867 - DNA, 200 bp, Ambrosia trifida
tagatgctacgttaaatcttcaataaaaaaactaaaggaaaaaaaaaaatcaaaattgcagctattgagttatctaccccagatccctgccaccgtggaccacgcatgggtgatgcgatgttccacgaatgaatcattttatgcccttaacaccacatgatcttagactagacggtgtggttatagggtgaagggggcat

SEQ ID NO: 2868 - DNA, 200 bp, Ambrosia trifida
atgcccccttcaccctataaccacaccgtctagtctaagatcatgtggtgttaagggcataaaatgattcattcgtggaacatcgcatcacccatgcgtggtccacggtggcagggatctggggtagataactcaatagctgcaattttgatttttttttttcctttagtttttttattgaagatttaacgtagcatcta

SEQ ID NO: 2869 - DNA, 200 bp, Ambrosia trifida
gtcatgtattgcattctatgagactatgactactcagggactattttatcagtttctacaagcttacagtgcttattgtcatgctttatggaagtctatgaagtttattttcgttacagtgcttatggtctaattttgttttgactcaagaaaacctgtatatttgtttgagtgatttttaataagacaaaaatctgtgg

SEQ ID NO: 2870 - DNA, 200 bp, Ambrosia trifida
ccacagatttttgtcttattaaaaatcactcaaacaaatatacaggttttcttgagtcaaaacaaaattagaccataagcactgtaacgaaaataaacttcatagacttccataaagcatgacaataagcactgtaagcttgtagaaactgataaaatagtccctgagtagtcatagtctcatagaatgcaatacatgac

SEQ ID NO: 2871 - DNA, 200 bp, Ambrosia trifida
tttttaataagacaaaaatctgtggttgctatcattatgcaatttctgagtaaatttgtttttctagttccaaaacacataatcgtcttaggctcgggacttcacaattttctttttaatctaacatacataatcgtgtttacgactcataatcaatatgatttgctctaatgtaccggtaaaataaacactttgtatcg

SEQ ID NO: 2872 - DNA, 200 bp, Ambrosia trifida
cgatacaaagtgtttattttaccggtacattagagcaaatcatattgattatgagtcgtaaacacgattatgtatgttagattaaaaagaaaattgtgaagtcccgagcctaagacgattatgtgttttggaactagaaaaacaaatttactcagaaattgcataatgatagcaaccacagatttttgtcttattaaaaa

SEQ ID NO: 2873 - DNA, 200 bp, Ambrosia trifida
ccggtaaaataaacactttgtatcgctttgtgctatcataaagagctgattgcctgatagaagttctaaataaattctttttttttacgttggaatctaggtaactggtgacccagggaaaatggttgcggtgcaaagaaatttaagcaagtttgggatccaagaagttgctaggaccgggaaggtaagtaaatagtgca

SEQ ID NO: 2874 - DNA, 200 bp, Ambrosia trifida
tgcactatttacttaccttcccggtcctagcaacttcttggatcccaaacttgcttaaatttctttgcaccgcaaccattttccctgggtcaccagttacctagattccaacgtaaaaaaaaagaatttatttagaacttctatcaggcaatcagctctttatgatagcacaaagcgatacaaagtgtttattttaccgg

SEQ ID NO: 2875 - DNA, 200 bp, Ambrosia trifida
accgggaaggtaagtaaatagtgcattcatagtgtattcaaatgcattaaacctcctaagtttatctattctttcttttgaaatagtattgtaatgatataattattttaatcatatttagtacttaagttatttgcaaaattcaaaaagtgaatgaaaagttattggggtctggcggtctgctcaacgtgagctgactt

SEQ ID NO: 2876 - DNA, 200 bp, Ambrosia trifida
aagtcagctcacgttgagcagaccgccagaccccaataacttttcattcactttttgaattttgcaaataacttaagtactaaatatgattaaaataattatatcattacaatactatttcaaaagaaagaatagataaacttaggaggtttaatgcatttgaatacactatgaatgcactatttacttaccttcccggt

SEQ ID NO: 2877 - DNA, 200 bp, Ambrosia trifida
cggtctgctcaacgtgagctgacttggacttatagttacctccctgaccatctttaatgctttagattgccttgagaagagaaagaatgggtgaagatgctcctttctggcggttttcagcagcttcatatcctgaccttgaagaaatgaacaaaagaactcctcttcaagccaaaaagagaacagagtatcaggaatct

SEQ ID NO: 2878 - DNA, 200 bp, Ambrosia trifida
agattcctgatactctgttctctttttggcttgaagaggagttcttttgttcatttcttcaaggtcaggatatgaagctgctgaaaaccgccagaaaggagcatcttcacccattctttctcttctcaaggcaatctaaagcattaaagatggtcagggaggtaactataagtccaagtcagctcacgttgagcagaccg

SEQ ID NO: 2879 - DNA, 200 bp, Ambrosia trifida
aaagagaacagagtatcaggaatctgataagcctgctggggtaagtttcatatatttttgtttttgctgaaagttgtattaccttttgattaattataaacattttttgtttgtgaagggagatgtttatccagtagattcatctgatgattattcattcaatcaagttcttgatgcacattggggtgttcttaatgaag

SEQ ID NO: 2880 - DNA, 200 bp, Ambrosia trifida
cttcattaagaacaccccaatgtgcatcaagaacttgattgaatgaataatcatcagatgaatctactggataaacatctcccttcacaaacaaaaaatgtttataattaatcaaaaggtaatacaactttcagcaaaaacaaaaatatatgaaacttaccccagcaggcttatcagattcctgatactctgttctcttt

SEQ ID NO: 2881 - DNA, 200 bp, Ambrosia trifida
gcacattggggtgttcttaatgaagaagatgtaagaccttattgtcaattcttaatttccacaaacatcataaaaacatgggaagcatttcaacaattttttgtttaatgtttttagacaagcgggcttcgttcccacactttatcaatcgttgtaaatgactctcctggagttctcaatatcgtaacaggagtttttgc

SEQ ID NO: 2882 - DNA, 200 bp, Ambrosia trifida
gcaaaaactcctgttacgatattgagaactccaggagagtcatttacaacgattgataaagtgtgggaacgaagcccgcttgtctaaaaacattaaacaaaaaattgttgaaatgcttcccatgtttttatgatgtttgtggaaattaagaattgacaataaggtcttacatcttcttcattaagaacaccccaatgtgc

SEQ ID NO: 2883 - DNA, 200 bp, Ambrosia trifida
tcaatatcgtaacaggagtttttgctcgcagaggctataatattcaggtatactttttgtggtgttgaatgttgattttacgtttgttttcttattgtaattattttaacaattgccagaaattgaagtctttttggtgtttgtattttttaaatatcagagtctagcagtcggtcatgcagaagtagaggggcgttccc

SEQ ID NO: 2884 - DNA, 200 bp, Ambrosia trifida
gggaacgcccctctacttctgcatgaccgactgctagactctgatatttaaaaaatacaaacaccaaaaagacttcaatttctggcaattgttaaaataattacaataagaaaacaaacgtaaaatcaacattcaacaccacaaaaagtatacctgaatattatagcctctgcgagcaaaaactcctgttacgatattga

SEQ ID NO: 2885 - DNA, 200 bp, Ambrosia trifida
catgcagaagtagaggggcgttcccgcatcacaactgttgtccctggtacagatgagtcaattgcaaagttggttcaacaactatacaagttgatagatgtgcatgatgtgagtatatatcaccgttggaaattgcttcatttactcgattcatgttatgttttaactcagatgagtaaagctaaatgaaattaactaaa

SEQ ID NO: 2886 - DNA, 200 bp, Ambrosia trifida
tttagttaatttcatttagctttactcatctgagttaaaacataacatgaatcgagtaaatgaagcaatttccaacggtgatatatactcacatcatgcacatctatcaacttgtatagttgttgaaccaactttgcaattgactcatctgtaccagggacaacagttgtgatgcgggaacgcccctctacttctgcatg

SEQ ID NO: 2887 - DNA, 200 bp, Ambrosia trifida
gtaaagctaaatgaaattaactaaaaaggaaaaggatcgtaagagtctaaagtctcttgaagtgtatttttaattaataaaacctctaaaatcattttattaattccatgatcatatctgacacttttattttttgtgacaatccagtctgcgcaaacaattagctgcattttgctacttgtacccattatgtttagttt

SEQ ID NO: 2888 - DNA, 200 bp, Ambrosia trifida
aaactaaacataatgggtacaagtagcaaaatgcagctaattgtttgcgcagactggattgtcacaaaaaataaaagtgtcagatatgatcatggaattaataaaatgattttagaggttttattaattaaaaatacacttcaagagactttagactcttacgatccttttcctttttagttaatttcatttagctttac

SEQ ID NO: 2889 - DNA, 200 bp, Ambrosia trifida
tacttgtacccattatgtttagttttttgagatggttcataggtcatttctcagattttgaggttgctccgctgaattcattcaattgagtgaccaacaaacatatttttgtttgttcaggttgtggatttaacattgatgccatttgccgaacgagaattgatgctgattaagattgctgtgaattcaacggcccgacg

SEQ ID NO: 2890 - DNA, 200 bp, Ambrosia trifida
cgtcgggccgttgaattcacagcaatcttaatcagcatcaattctcgttcggcaaatggcatcaatgttaaatccacaacctgaacaaacaaaaatatgtttgttggtcactcaattgaatgaattcagcggagcaacctcaaaatctgagaaatgacctatgaaccatctcaaaaaactaaacataatgggtacaagta

SEQ ID NO: 2891 - DNA, 200 bp, Ambrosia trifida
ttgctgtgaattcaacggcccgacgcaatgttcttgatattgcaagcatatttagggctaaagccgtagatgtgtcagatcatacaattacacttgaggtgaattttattcacttgcagtttattttctgtcaagtgaaaattctaatacttatattttgagtcgtttctagaaaattgctccatttcttcttttgggga

SEQ ID NO: 2892 - DNA, 200 bp, Ambrosia trifida
tccccaaaagaagaaatggagcaattttctagaaacgactcaaaatataagtattagaattttcacttgacagaaaataaactgcaagtgaataaaattcacctcaagtgtaattgtatgatctgacacatctacggctttagccctaaatatgcttgcaatatcaagaacattgcgtcgggccgttgaattcacagcaa

SEQ ID NO: 2893 - DNA, 200 bp, Ambrosia trifida
attgctccatttcttcttttggggaaaattccagctagaccaaggacaagtgatgtgctaatctaatcccatgcttgttcacaaaatagaaaccactagtgagactaaccagaagccatcttcatctaaagcccatgcttgttgtttgagtgtttgatgtgaacccaaccttagataaatatggttctgggccaagtctc

SEQ ID NO: 2894 - DNA, 200 bp, Ambrosia trifida
gagacttggcccagaaccatatttatctaaggttgggttcacatcaaacactcaaacaacaagcatgggctttagatgaagatggcttctggttagtctcactagtggtttctattttgtgaacaagcatgggattagattagcacatcacttgtccttggtctagctggaattttccccaaaagaagaaatggagcaat

SEQ ID NO: 2895 - DNA, 200 bp, Ambrosia trifida
taaatatggttctgggccaagtctcattactagtgtttaacttacgatcatggggttttacatgatgttagggaggatagttaagattagtggttgtcggccaagcaaaatcatgtggggttatttattttataaaagaaatttagcccaattaaaaatcaaaaaaataaaaataagaaatacatacattcgattatgaa

SEQ ID NO: 2896 - DNA, 200 bp, Ambrosia trifida
ttcataatcgaatgtatgtatttcttatttttatttttttgatttttaattgggctaaatttcttttataaaataaataaccccacatgattttgcttggccgacaaccactaatcttaactatcctccctaacatcatgtaaaaccccatgatcgtaagttaaacactagtaatgagacttggcccagaaccatattta

SEQ ID NO: 2897 - DNA, 200 bp, Ambrosia trifida
agaaatacatacattcgattatgaactattttagaagtatgatgctcttttttcttccaaaagtaaccaagatagaacatagtttcgaagttcagtggcatggtgtgtggaaagtctacattggaatgcattttgttattgaatatagtatttaaattatatatttttgaataaatatttaagcttttcaaatcgagctt

SEQ ID NO: 2898 - DNA, 200 bp, Ambrosia trifida
aagctcgatttgaaaagcttaaatatttattcaaaaatatataatttaaatactatattcaataacaaaatgcattccaatgtagactttccacacaccatgccactgaacttcgaaactatgttctatcttggttacttttggaagaaaaaagagcatcatacttctaaaatagttcataatcgaatgtatgtatttct

SEQ ID NO: 2899 - DNA, 200 bp, Ambrosia trifida
tatttaagcttttcaaatcgagcttgagccgatctcaaatcctccttgagctgatcttaaatcatccttgagccgaggtcatgcatggctacattaccttttgtttggtttctatacaagaaccaatgcaacacaaaccgcatagcatatacaatatggcacattataaagcttcactgaaacattaaatcaatcactgc

SEQ ID NO: 2900 - DNA, 200 bp, Ambrosia trifida
gcagtgattgatttaatgtttcagtgaagctttataatgtgccatattgtatatgctatgcggtttgtgttgcattggttcttgtatagaaaccaaacaaaaggtaatgtagccatgcatgacctcggctcaaggatgatttaagatcagctcaaggaggatttgagatcggctcaagctcgatttgaaaagcttaaata

SEQ ID NO: 2901 - DNA, 200 bp, Ambrosia trifida
actgaaacattaaatcaatcactgcatgttctttatgatcccttatttgttttacgtgtattttctaggttactggagatctgaataagatggttgcactgcagaggttgttggaaccttgcggaatttgtgaggtctgtttgtgaatcccttgtctccaatcatatttttattaaacccgacttcattcaaggtttaga

SEQ ID NO: 2902 - DNA, 200 bp, Ambrosia trifida
tctaaaccttgaatgaagtcgggtttaataaaaatatgattggagacaagggattcacaaacagacctcacaaattccgcaaggttccaacaacctctgcagtgcaaccatcttattcagatctccagtaacctagaaaatacacgtaaaacaaataagggatcataaagaacatgcagtgattgatttaatgtttcagt

SEQ ID NO: 2903 - DNA, 200 bp, Ambrosia trifida
aacccgacttcattcaaggtttagacttacacccctgctcgacgatcatttgcaggtggcaagaacaggtcgcgtggcactgacccgcgagtcaggcgttgattcctcttaccttcgtggatattcctatcctgtttgatttctatcttttatagcttcttcctgtttcgggtagagattgtcagtaatttgggtgttct

SEQ ID NO: 2904 - DNA, 200 bp, Ambrosia trifida
agaacacccaaattactgacaatctctacccgaaacaggaagaagctataaaagatagaaatcaaacaggataggaatatccacgaaggtaagaggaatcaacgcctgactcgcgggtcagtgccacgcgacctgttcttgccacctgcaaatgatcgtcgagcaggggtgtaagtctaaaccttgaatgaagtcgggtt

SEQ ID NO: 2905 - DNA, 200 bp, Ambrosia trifida
agattgtcagtaatttgggtgttctttttctatctggtacctagtctaagttgtatgtttttaacaatagatttttgttttttcatccgacttttaagaccctgttttgactctatatgaagttacatacgtaaatacatgctatgtgtggccctttctagaaaaaggtgagttaggcatcgtgggttcgggttaaacat

SEQ ID NO: 2906 - DNA, 200 bp, Ambrosia trifida
atgtttaacccgaacccacgatgcctaactcacctttttctagaaagggccacacatagcatgtatttacgtatgtaacttcatatagagtcaaaacagggtcttaaaagtcggatgaaaaaacaaaaatctattgttaaaaacatacaacttagactaggtaccagatagaaaaagaacacccaaattactgacaatct

SEQ ID NO: 2907 - DNA, 200 bp, Ambrosia trifida
ggcatcgtgggttcgggttaaacatgtcatttattggtacaagtcgcggcgactagctggtgggctgggttgcggcaacccacaaaacacttgtttgtttgattttagtttaccttttttgaacagggaatttattttacttcttagaaggtttgtgttgatagaatagttaattcgatgactagtatggttttgaaaac

SEQ ID NO: 2908 - DNA, 200 bp, Ambrosia trifida
gttttcaaaaccatactagtcatcgaattaactattctatcaacacaaaccttctaagaagtaaaataaattccctgttcaaaaaaggtaaactaaaatcaaacaaacaagtgttttgtgggttgccgcaacccagcccaccagctagtcgccgcgacttgtaccaataaatgacatgtttaacccgaacccacgatgcc

SEQ ID NO: 2909 - DNA, 200 bp, Ambrosia trifida
tctttaacaaactgtgtatgttaaaaggactataatgccccagttatatgttgataactaagtgtgtggtatgattaatgagcagggtgaagcgtcacacgatctcggtgtttgttggggatgaaagtggtattataaatcgaattgcgggggtgtttgctagacgaggttataatatcgagtcgcttgcggttggtttg

SEQ ID NO: 2910 - DNA, 200 bp, Ambrosia trifida
caaaccaaccgcaagcgactcgatattataacctcgtctagcaaacacccccgcaattcgatttataataccactttcatccccaacaaacaccgagatcgtgtgacgcttcaccctgctcattaatcataccacacacttagttatcaacatataactggggcattatagtccttttaacatacacagtttgttaaaga

SEQ ID NO: 2911 - DNA, 200 bp, Ambrosia trifida
tatcgagtcgcttgcggttggtttgaataaggataaggctttgtttactattgttgtctctgggactgagaaggtgttgcagcaagttgtagagcaacttaacaagcttgttaatgtcttgaaggtctcatcttgtaatttacgctgctatcgtcgttcattaataacgttgttcctaatgcgttactcagttttgtttg

SEQ ID NO: 2912 - DNA, 200 bp, Ambrosia trifida
caaacaaaactgagtaacgcattaggaacaacgttattaatgaacgacgatagcagcgtaaattacaagatgagaccttcaagacattaacaagcttgttaagttgctctacaacttgctgcaacaccttctcagtcccagagacaacaatagtaaacaaagccttatccttattcaaaccaaccgcaagcgactcgata

SEQ ID NO: 2913 - DNA, 200 bp, Ambrosia trifida
ctaatgcgttactcagttttgtttgatgtaccaggtggaagatctttctcgggatccgcaagtagagcgggaattgatgcttgtgaagcttaatgttgatccaagcacaaaagctgaggtacgtacttatatgatgtttcttgcaatttatcatttaattatgcgttcctgttcaatggtcgggtcaacaaacaagtgtc

SEQ ID NO: 2914 - DNA, 200 bp, Ambrosia trifida
gacacttgtttgttgacccgaccattgaacaggaacgcataattaaatgataaattgcaagaaacatcatataagtacgtacctcagcttttgtgcttggatcaacattaagcttcacaagcatcaattcccgctctacttgcggatcccgagaaagatcttccacctggtacatcaaacaaaactgagtaacgcattag

SEQ ID NO: 2915 - DNA, 200 bp, Ambrosia trifida
atggtcgggtcaacaaacaagtgtcgcgtgttgtttaaaaatgtagtttgtttaagttgataaatattacttacttttaccttcagattatgtggttagtagacatctttagaggcaatgtggtggatgcatcggaatcctcattgactatagaggtgacttcctcctattcatcaagcttgtgtgtttatacaaattat

SEQ ID NO: 2916 - DNA, 200 bp, Ambrosia trifida
ataatttgtataaacacacaagcttgatgaataggaggaagtcacctctatagtcaatgaggattccgatgcatccaccacattgcctctaaagatgtctactaaccacataatctgaaggtaaaagtaagtaatatttatcaacttaaacaaactacatttttaaacaacacgcgacacttgtttgttgacccgaccat

SEQ ID NO: 2917 - DNA, 200 bp, Ambrosia trifida
aagcttgtgtgtttatacaaattattaagcgattttgatgtttatgtcgtcagtaatagttctcatatggttaatctaggttactggggatcccgggaagatagctgctgttcagaggaatctagctaagtttggaatcaaagaacttacaagaacaggaaaggtaattgtttaacgactgtttgtttacgatgattggt

SEQ ID NO: 2918 - DNA, 200 bp, Ambrosia trifida
accaatcatcgtaaacaaacagtcgttaaacaattacctttcctgttcttgtaagttctttgattccaaacttagctagattcctctgaacagcagctatcttcccgggatccccagtaacctagattaaccatatgagaactattactgacgacataaacatcaaaatcgcttaataatttgtataaacacacaagctt

SEQ ID NO: 2919 - DNA, 200 bp, Ambrosia trifida
cgactgtttgtttacgatgattggttcttgactgaatttgctgctgcttgtatgtagattgcgctaagacgggaaaaaatgggtgaaactgctccgttttggaacttctctgcagcatcttatccagatctagaagccctgggtcctgttgctgccgtttctaaagtggctgacgagactcctagtccaacgtcaggggt

SEQ ID NO: 2920 - DNA, 200 bp, Ambrosia trifida
acccctgacgttggactaggagtctcgtcagccactttagaaacggcagcaacaggacccagggcttctagatctggataagatgctgcagagaagttccaaaacggagcagtttcacccattttttcccgtcttagcgcaatctacatacaagcagcagcaaattcagtcaagaaccaatcatcgtaaacaaacagtcg

SEQ ID NO: 2921 - DNA, 200 bp, Ambrosia trifida
ttaggtggaataacaaatgtgtatagaggttgagaaaacagaataatgtagatatctatatctttaacaaactgtgtatgttaaaaggactataatgccccagttatatgttgataactaagtgtgtggtatgattaatgagcagggtgaagcgtcacacgatctcggtgtttgttggggatgaaagtggtattataaat

SEQ ID NO: 2922 - DNA, 200 bp, Ambrosia trifida
atttataataccactttcatccccaacaaacaccgagatcgtgtgacgcttcaccctgctcattaatcataccacacacttagttatcaacatataactggggcattatagtccttttaacatacacagtttgttaaagatatagatatctacattattctgttttctcaacctctatacacatttgttattccacctaa

SEQ ID NO: 2923 - DNA, 200 bp, Ambrosia trifida
tggggatgaaagtggtattataaatcgaattgcgggggtgtttgctagacgaggttataatatcgagtcgcttgcggttggtttgaataaggataaggctttgtttactattgttgtctctgggactgagaaggtgttgcagcaagttgtagagcaacttaacaagcttgttaatgtcttgaaggtctcatcttgtaatt

SEQ ID NO: 2924 - DNA, 200 bp, Ambrosia trifida
aattacaagatgagaccttcaagacattaacaagcttgttaagttgctctacaacttgctgcaacaccttctcagtcccagagacaacaatagtaaacaaagccttatccttattcaaaccaaccgcaagcgactcgatattataacctcgtctagcaaacacccccgcaattcgatttataataccactttcatcccca

SEQ ID NO: 2925 - DNA, 200 bp, Ambrosia trifida
gtcttgaaggtctcatcttgtaatttacgctgctatcgtcgttcattaataacgttgttcctaatgcgttactcagttttgtttgatgtaccaggtggaagatctttctcgggatccgcaagtagagcgggaattgatgcttgtgaagcttaatgttgatccaagcacaaaagctgaggtacgtacttatatgatgtttc

SEQ ID NO: 2926 - DNA, 200 bp, Ambrosia trifida
gaaacatcatataagtacgtacctcagcttttgtgcttggatcaacattaagcttcacaagcatcaattcccgctctacttgcggatcccgagaaagatcttccacctggtacatcaaacaaaactgagtaacgcattaggaacaacgttattaatgaacgacgatagcagcgtaaattacaagatgagaccttcaagac

SEQ ID NO: 2927 - DNA, 200 bp, Ambrosia trifida
gaggtacgtacttatatgatgtttcttgcaatttatcatttaattatgcgttcctgttcaatggtcgggtcaacaaacaagtgtcgcgtgttgtttaaaaatgtagtttgtttaagttgataaatattacttacttttaccttcagattatgtggttagtagacatctttagaggcaatgtggtggatgcatcggaatcc

SEQ ID NO: 2928 - DNA, 200 bp, Ambrosia trifida
ggattccgatgcatccaccacattgcctctaaagatgtctactaaccacataatctgaaggtaaaagtaagtaatatttatcaacttaaacaaactacatttttaaacaacacgcgacacttgtttgttgacccgaccattgaacaggaacgcataattaaatgataaattgcaagaaacatcatataagtacgtacctc

SEQ ID NO: 2929 - DNA, 200 bp, Commelina diffusa
agtcccgggaacagatgaatctatcggcaagctagttcagcacctttacaagcttatcgatgttcacgaggtcaattgagctttacattcagccatattcttctaccgattcttgtatctgaacatatgatgcattcaggttcatgatataactcatttgccgttctctgaaagagagttgatgcttataaaagttgctg

SEQ ID NO: 2930 - DNA, 200 bp, Commelina diffusa
cagcaacttttataagcatcaactctctttcagagaacggcaaatgagttatatcatgaacctgaatgcatcatatgttcagatacaagaatcggtagaagaatatggctgaatgtaaagctcaattgacctcgtgaacatcgataagcttgtaaaggtgctgaactagcttgccgatagattcatctgttcccgggact

SEQ ID NO: 2931 - DNA, 200 bp, Commelina diffusa
attaagtctacagctggatcattcaatgggaacacagaacaatcatctggaggagatgtttatccagtggaaccttacgaaggctttgttttcaatcaagttcttgatgctcattggggtgttctcgacgatgaagattcgagtggcctgcgttcacacacattgtccattgttgtaagtgatattcccggtgtcctcaa

SEQ ID NO: 2932 - DNA, 200 bp, Commelina diffusa
ttgaggacaccgggaatatcacttacaacaatggacaatgtgtgtgaacgcaggccactcgaatcttcatcgtcgagaacaccccaatgagcatcaagaacttgattgaaaacaaagccttcgtaaggttccactggataaacatctcctccagatgattgttctgtgttcccattgaatgatccagctgtagacttaat

SEQ ID NO: 2933 - DNA, 200 bp, Commelina diffusa
taagtgatattcccggtgtcctcaacattgtaactggggtgtttgctcgtaggggctataacattcagagccttgctgttggcccagctgaaaaggaaaatgtctctcgtattactactgtagtcccgggaacagatgaatctatcggcaagctagttcagcacctttacaagcttatcgatgttcacgaggttcatgat

SEQ ID NO: 2934 - DNA, 200 bp, Commelina diffusa
atcatgaacctcgtgaacatcgataagcttgtaaaggtgctgaactagcttgccgatagattcatctgttcccgggactacagtagtaatacgagagacattttccttttcagctgggccaacagcaaggctctgaatgttatagcccctacgagcaaacaccccagttacaatgttgaggacaccgggaatatcactta

SEQ ID NO: 2935 - DNA, 200 bp, Commelina diffusa
tatcgatgttcacgaggttcatgatataactcatttgccgttctctgaaagagagttgatgcttataaaagttgctgtgaacactgatgctagacgggatatcctagacattgctaatgttttccgggcaaaagctgttgatgtttctgatcatacagtcacacttgagcttactggagacttcgagaagttggttgcat

SEQ ID NO: 2936 - DNA, 200 bp, Commelina diffusa
atgcaaccaacttctcgaagtctccagtaagctcaagtgtgactgtatgatcagaaacatcaacagcttttgcccggaaaacattagcaatgtctaggatatcccgtctagcatcagtgttcacagcaacttttataagcatcaactctctttcagagaacggcaaatgagttatatcatgaacctcgtgaacatcgata

SEQ ID NO: 2937 - DNA, 200 bp, Commelina diffusa
cactcataactttggattttgataatctgatttttctgtagattgctttgagacgtgagaagatgggcgcaactgcacccttttggcggttctcagctgcttcatatccagatcttgaagcctcagtgccagttagtactcctattaagtctacagctggatcattcaatgggaacacagaacaatcatctggagtaagt

SEQ ID NO: 2938 - DNA, 200 bp, Commelina diffusa
acttactccagatgattgttctgtgttcccattgaatgatccagctgtagacttaataggagtactaactggcactgaggcttcaagatctggatatgaagcagctgagaaccgccaaaagggtgcagttgcgcccatcttctcacgtctcaaagcaatctacagaaaaatcagattatcaaaatccaaagttatgagtg

SEQ ID NO: 2939 - DNA, 200 bp, Commelina diffusa
cattcatgtatttgccctactgtcaatttgcaggtcatggctctggtcgatatttttagggcaaaagtagttgacatttcagacgagactctgaccattgaggtcatatctatctaaaaatcgttttcttctaagaaagtgaacgttaattatcttagctctccagtcatgagtcaattcttcttcagctgagatcttgg

SEQ ID NO: 2940 - DNA, 200 bp, Commelina diffusa
ccaagatctcagctgaagaagaattgactcatgactggagagctaagataattaacgttcactttcttagaagaaaacgatttttagatagatatgacctcaatggtcagagtctcgtctgaaatgtcaactacttttgccctaaaaatatcgaccagagccatgacctgcaaattgacagtagggcaaatacatgaatg

SEQ ID NO: 2941 - DNA, 200 bp, Commelina diffusa
ctagaagtttataaacatcaccttggcaatttttatcgtgacaaacttcttgtttatttatttggttttgctttgattaagttggtattcagctaggagtaacagattgccaaattgtagaaatgcattttttttaataccaaacattggatatataggaaagttttgaatattctttcgttttaagttagtatgttggt

SEQ ID NO: 2942 - DNA, 200 bp, Commelina diffusa
accaacatactaacttaaaacgaaagaatattcaaaactttcctatatatccaatgtttggtattaaaaaaaatgcatttctacaatttggcaatctgttactcctagctgaataccaacttaatcaaagcaaaaccaaataaataaacaagaagtttgtcacgataaaaattgccaaggtgatgtttataaacttctag

SEQ ID NO: 2943 - DNA, 200 bp, Commelina diffusa
tttcgttttaagttagtatgttggttctttctttattagagcccttttagtgcatttctctcgaaattcttatgagataattgagttctgtgtaactgtagaataaggagacacactatatctgtttttgttggagatgagagcggaatcataaatcggatagctggtgtgtttgcaagaaggggattcaacattgaatc

SEQ ID NO: 2944 - DNA, 200 bp, Commelina diffusa
gattcaatgttgaatccccttcttgcaaacacaccagctatccgatttatgattccgctctcatctccaacaaaaacagatatagtgtgtctccttattctacagttacacagaactcaattatctcataagaatttcgagagaaatgcactaaaagggctctaataaagaaagaaccaacatactaacttaaaacgaaa

SEQ ID NO: 2945 - DNA, 200 bp, Commelina diffusa
caagaaggggattcaacattgaatcacttgcagttggtttaaataaggacaaggcactatttactgtagttgtgtctgggactgagaaagtgttacagcaggttgtggagcagctaaataagctcattagtgttttgaaggtaagttgacaatttctgattattggttagagtgctctgtgttgatttataaggatgtat

SEQ ID NO: 2946 - DNA, 200 bp, Commelina diffusa
atacatccttataaatcaacacagagcactctaaccaataatcagaaattgtcaacttaccttcaaaacactaatgagcttatttagctgctccacaacctgctgtaacactttctcagtcccagacacaactacagtaaatagtgccttgtccttatttaaaccaactgcaagtgattcaatgttgaatccccttcttg

SEQ ID NO: 2947 - DNA, 200 bp, Commelina diffusa
tctgtgttgatttataaggatgtatttatatttatttgcacatgctgtggattaggttgaggatttgtccaaggagcctcaggttgaacgagagttgatgcttataaaactcaacgttaacccagatgagcgccaagaggtatgtactattgtatatcactttacaatttggtatttcacttcttggagttctaaatttc

SEQ ID NO: 2948 - DNA, 200 bp, Commelina diffusa
gaaatttagaactccaagaagtgaaataccaaattgtaaagtgatatacaatagtacatacctcttggcgctcatctgggttaacgttgagttttataagcatcaactctcgttcaacctgaggctccttggacaaatcctcaacctaatccacagcatgtgcaaataaatataaatacatccttataaatcaacacaga

SEQ ID NO: 2949 - DNA, 200 bp, Commelina diffusa
tcatcagtactctattcgtacatgcatctcttgtacactgcatatatcctttgattttcatttttattgctgctaggcttgattataatttagatccctcattttttgtggttaagggagatgtttatccagtggaaccttacgaaggctttgttttcaatcaagttcttgatgctcattggggtgttctcgacgatgaa

SEQ ID NO: 2950 - DNA, 200 bp, Commelina diffusa
ttcatcgtcgagaacaccccaatgagcatcaagaacttgattgaaaacaaagccttcgtaaggttccactggataaacatctcccttaaccacaaaaaatgagggatctaaattataatcaagcctagcagcaataaaaatgaaaatcaaaggatatatgcagtgtacaagagatgcatgtacgaatagagtactgatga

SEQ ID NO: 2951 - DNA, 200 bp, Commelina diffusa
ttataacactgttagttgccaaaacttctagaactaaactttttacctgctatatggattacactagtaaatgacataatgctatcgcttctggtaaaccgtctcgcaacttgtcaatcacttcatgaaatttgacaccttctattatgtagtatcaaccataattttgtggtaatattgcttctaatgtgttgcaggtg

SEQ ID NO: 2952 - DNA, 200 bp, Commelina diffusa
cacctgcaacacattagaagcaatattaccacaaaattatggttgatactacataatagaaggtgtcaaatttcatgaagtgattgacaagttgcgagacggtttaccagaagcgatagcattatgtcatttactagtgtaatccatatagcaggtaaaaagtttagttctagaagttttggcaactaacagtgttataa

SEQ ID NO: 2953 - DNA, 200 bp, Conyza canadensis
aaagtgtaaattaatttagacatgcgttgatttaattacttttgataaattgagagttgtaattggtcaattgagattagttcaattatcttttagtatatagtaagattaagattaagataagataagattaagattttagcatcctgattagaaattatgtataactatgttatctcttctccgaagttaatttacct

SEQ ID NO: 2954 - DNA, 200 bp, Conyza canadensis
aggtaaattaacttcggagaagagataacatagttatacataatttctaatcaggatgctaaaatcttaatcttatcttatcttaatcttaatcttactatatactaaaagataattgaactaatctcaattgaccaattacaactctcaatttatcaaaagtaattaaatcaacgcatgtctaaattaatttacacttt

SEQ ID NO: 2955 - DNA, 200 bp, Conyza canadensis
tctcttctccgaagttaatttacctaattattagtattgttacattacattaccaaagtttgataaattggtaaatataatttggagtaaggattaaggaatgagctaaacactaacgggccactggccaaattattttttcttagcttctatatatggaccaaaaagtttactcattttgggctacttcaaatgagcca

SEQ ID NO: 2956 - DNA, 200 bp, Conyza canadensis
tggctcatttgaagtagcccaaaatgagtaaactttttggtccatatatagaagctaagaaaaaataatttggccagtggcccgttagtgtttagctcattccttaatccttactccaaattatatttaccaatttatcaaactttggtaatgtaatgtaacaatactaataattaggtaaattaacttcggagaagaga

SEQ ID NO: 2957 - DNA, 200 bp, Conyza canadensis
attttgggctacttcaaatgagccacatgcaaaaccaaaaaaaaaaaaaaaacttaagaaaataaaaaataaattgagccaaccttatttatgtctttttaaattattatttttttttggttttgattttttatccctctcgcaaaataggtataggtatttgacctaagaattttttagcaaatatatctagaatgaag

SEQ ID NO: 2958 - DNA, 200 bp, Conyza canadensis
cttcattctagatatatttgctaaaaaattcttaggtcaaatacctatacctattttgcgagagggataaaaaatcaaaaccaaaaaaaaataataatttaaaaagacataaataaggttggctcaatttattttttattttcttaagttttttttttttttttggttttgcatgtggctcatttgaagtagcccaaaat

SEQ ID NO: 2959 - DNA, 200 bp, Conyza canadensis
tttagcaaatatatctagaatgaagtcgtcgtggtattgcttttaaatagatatattagatattagaaacattttatcgtgatatcatctttaaatcactactagaaaaatagcctttaatgacaccaaaattatgacacacgcatttacgatgatgcgcaatttttggtgtcataaaaaaactgtcataacttgtaaaa

SEQ ID NO: 2960 - DNA, 200 bp, Conyza canadensis
ttttacaagttatgacagtttttttatgacaccaaaaattgcgcatcatcgtaaatgcgtgtgtcataattttggtgtcattaaaggctatttttctagtagtgatttaaagatgatatcacgataaaatgtttctaatatctaatatatctatttaaaagcaataccacgacgacttcattctagatatatttgctaaa

SEQ ID NO: 2961 - DNA, 200 bp, Conyza canadensis
aaaaaaactgtcataacttgtaaaatctgaagggttatgacacacaatttttggtgtcataaaaaaatgtagtgtaacgcggaatacacttacatttgcgtatcatcctcaagtgtcgtcttataattttattccccatataaaagcttataattttttatttcaatcagatcgaagcctatacttttttttttcaatca

SEQ ID NO: 2962 - DNA, 200 bp, Conyza canadensis
tgattgaaaaaaaaaagtataggcttcgatctgattgaaataaaaaattataagcttttatatggggaataaaattataagacgacacttgaggatgatacgcaaatgtaagtgtattccgcgttacactacatttttttatgacaccaaaaattgtgtgtcataacccttcagattttacaagttatgacagttttttt

SEQ ID NO: 2963 - DNA, 200 bp, Conyza canadensis
agcctatacttttttttttcaatcagatccagaaccccaaaaccctataatttttcaatcgaagccccaaaatcgatcgattaatcaatcaattcaataatcacaaattaatggtaacgattattcctttctttacaaattcaacagtatttcattgattcttaaggtttcaatattttgattataggcagcacaagatt

SEQ ID NO: 2964 - DNA, 200 bp, Conyza canadensis
aatcttgtgctgcctataatcaaaatattgaaaccttaagaatcaatgaaatactgttgaatttgtaaagaaaggaataatcgttaccattaatttgtgattattgaattgattgattaatcgatcgattttggggcttcgattgaaaaattatagggttttggggttctggatctgattgaaaaaaaaaagtataggct

SEQ ID NO: 2965 - DNA, 200 bp, Conyza canadensis
ttttgattataggcagcacaagattaaatcgaagaacttgatagtttgtttgattacactcgtagttgtttagaaatcattcccctcgatgacggttcgtatatatacaattaatagtttatagatttgttattatattaatcaattgaaaataactaaggtttcgttattatatttattttccattaattagtaaaaat

SEQ ID NO: 2966 - DNA, 200 bp, Conyza canadensis
atttttactaattaatggaaaataaatataataacgaaaccttagttattttcaattgattaatataataacaaatctataaactattaattgtatatatacgaaccgtcatcgaggggaatgatttctaaacaactacgagtgtaatcaaacaaactatcaagttcttcgatttaatcttgtgctgcctataatcaaaa

SEQ ID NO: 2967 - DNA, 200 bp, Conyza canadensis
ttattttccattaattagtaaaaattcagtgcgatgaatttttgaaatatgcgattagatctgagtttgcttttttctagacaagcaggcttcgacacacacactttatcgatggttataaatgactctcctggagttttaaatatagtaacaagagtttttgctcgtagaggttacaatattcaggtatgttttttttg

SEQ ID NO: 2968 - DNA, 200 bp, Conyza canadensis
caaaaaaaacatacctgaatattgtaacctctacgagcaaaaactcttgttactatatttaaaactccaggagagtcatttataaccatcgataaagtgtgtgtgtcgaagcctgcttgtctagaaaaaagcaaactcagatctaatcgcatatttcaaaaattcatcgcactgaatttttactaattaatggaaaataa

SEQ ID NO: 2969 - DNA, 200 bp, Conyza canadensis
acaatattcaggtatgttttttttgtatctgggatatttcattaatttgcttcttgaacatatggaattaccagagttttaagtagtttggtgtttgcatctttgattcagagtctgtcagttggtcatgcagaagttgaagggcgatcccgcatcaaaactgtcgttccgggtacaaatgagtcaaccaacaagttggt

SEQ ID NO: 2970 - DNA, 200 bp, Conyza canadensis
accaacttgttggttgactcatttgtacccggaacgacagttttgatgcgggatcgcccttcaacttctgcatgaccaactgacagactctgaatcaaagatgcaaacaccaaactacttaaaactctggtaattccatatgttcaagaagcaaattaatgaaatatcccagatacaaaaaaaacatacctgaatattgt

SEQ ID NO: 2971 - DNA, 200 bp, Conyza canadensis
caaatgagtcaaccaacaagttggttcaacaaatatacaagttctatcgccattgacctgttggagatccataagaaagagatggatctaatttcttcaaatataagattgggagagaaaggagcattttcatggaccactttattatatgtttcttccacaagcaccatattgtaatttgaacgattgcatttatcatt

SEQ ID NO: 2972 - DNA, 200 bp, Conyza canadensis
aatgataaatgcaatcgttcaaattacaatatggtgcttgtggaagaaacatataataaagtggtccatgaaaatgctcctttctctcccaatcttatatttgaagaaattagatccatctctttcttatggatctccaacaggtcaatggcgatagaacttgtatatttgttgaaccaacttgttggttgactcatttg

SEQ ID NO: 2973 - DNA, 200 bp, Conyza canadensis
aatttgaacgattgcatttatcattttcttccatttttttgtcaccaagtaatgtgttatgtaaaagatgcaggtctcgtacctgaaaggcatatatcggacttattttacaccatcttccaaccttgctccaaacatctaaaactaatgggcagccggtaaacaagtggtcacttgattcttcattcacattgcaaaac

SEQ ID NO: 2974 - DNA, 200 bp, Conyza canadensis
gttttgcaatgtgaatgaagaatcaagtgaccacttgtttaccggctgcccattagttttagatgtttggagcaaggttggaagatggtgtaaaataagtccgatatatgcctttcaggtacgagacctgcatcttttacataacacattacttggtgacaaaaaaatggaagaaaatgataaatgcaatcgttcaaatt

SEQ ID NO: 2975 - DNA, 200 bp, Conyza canadensis
tgattcttcattcacattgcaaaacgggcatagtaacgtggttggagaaataccacgttttgacagctgtaagagtgttggtaagcgatctaatcctgcccgccagttcatgatattcaccttttttttggatccatttgttccaacaaaagtcaacacccgagacattattatctacggcgtcaagtttctcccttacc

SEQ ID NO: 2976 - DNA, 200 bp, Conyza canadensis
ggtaagggagaaacttgacgccgtagataataatgtctcgggtgttgacttttgttggaacaaatggatccaaaaaaaaggtgaatatcatgaactggcgggcaggattagatcgcttaccaacactcttacagctgtcaaaacgtggtatttctccaaccacgttactatgcccgttttgcaatgtgaatgaagaatca

SEQ ID NO: 2977 - DNA, 200 bp, Conyza canadensis
tacggcgtcaagtttctcccttacctcaaccactatatatgaatcagattcaaatgttgcaagtatgtccacccctagtttatcaaaatcctgcttaagtttgtgtacatttctccaaagacctccgattctatttttgagtggaacatcgagcacgttacctgcttcaccatgaatagcaaccatcgtctttctccata

SEQ ID NO: 2978 - DNA, 200 bp, Conyza canadensis
tatggagaaagacgatggttgctattcatggtgaagcaggtaacgtgctcgatgttccactcaaaaatagaatcggaggtctttggagaaatgtacacaaacttaagcaggattttgataaactaggggtggacatacttgcaacatttgaatctgattcatatatagtggttgaggtaagggagaaacttgacgccgta

SEQ ID NO: 2979 - DNA, 200 bp, Conyza canadensis
atagcaaccatcgtctttctccataacctatctggttcaacatgaaaacgaaaccaccaacgtgctagcaaagccatatttgcaacctttaaagaaccaataccaaggccacccctatccttctgtctaacgacctcattccatgcaacccaactaatttttttatgctcttcattttgagcccagaaaaaccttctcca

SEQ ID NO: 2980 - DNA, 200 bp, Conyza canadensis
tggagaaggtttttctgggctcaaaatgaagagcataaaaaaattagttgggttgcatggaatgaggtcgttagacagaaggataggggtggccttggtattggttctttaaaggttgcaaatatggctttgctagcacgttggtggtttcgttttcatgttgaaccagataggttatggagaaagacgatggttgctat

SEQ ID NO: 2981 - DNA, 200 bp, Conyza canadensis
tttgagcccagaaaaaccttctccacagcctctccaattgatcatttattttcataggagctcaaaacaatgaaaaatagtgtatggtagacttgagagaacagattgaattaacgtgactcttcctcccaccgataaatttttggccttccaagaggataatcttttattaaaaacatcaactactggttgccaatgac

SEQ ID NO: 2982 - DNA, 200 bp, Conyza canadensis
gtcattggcaaccagtagttgatgtttttaataaaagattatcctcttggaaggccaaaaatttatcggtgggaggaagagtcacgttaattcaatctgttctctcaagtctaccatacactatttttcattgttttgagctcctatgaaaataaatgatcaattggagaggctgtggagaaggtttttctgggctcaaa

SEQ ID NO: 2983 - DNA, 200 bp, Conyza canadensis
acatcaactactggttgccaatgacaacatcgattcatactaacccctagaggaaagaccagatactccaatggaaaagacccttgcttgaaatgaaaatgctcagctacttgtgctactgattcagtttgagtcccaatcccgatgattgttgatttattaacattcatttttaacccagaaataatgtagaaacctct

SEQ ID NO: 2984 - DNA, 200 bp, Conyza canadensis
agaggtttctacattatttctgggttaaaaatgaatgttaataaatcaacaatcatcgggattgggactcaaactgaatcagtagcacaagtagctgagcattttcatttcaagcaagggtcttttccattggagtatctggtctttcctctaggggttagtatgaatcgatgttgtcattggcaaccagtagttgatgt

SEQ ID NO: 2985 - DNA, 200 bp, Conyza canadensis
acccagaaataatgtagaaacctctgatgattctgactaatttcaaaaagtttgagatagaccaggagcccaatagaagtacatcatcggcatataataggtgactaataatagggccttcattggcaactaaatcccgttgatcaggttttttgagatttcatcattcagaaaacaagtcaaaggttccatggctaaag

SEQ ID NO: 2986 - DNA, 200 bp, Conyza canadensis
ctttagccatggaacctttgacttgttttctgaatgatgaaatctcaaaaaacctgatcaacgggatttagttgccaatgaaggccctattattagtcacctattatatgccgatgatgtacttctattgggctcctggtctatctcaaactttttgaaattagtcagaatcatcagaggtttctacattatttctgggt

SEQ ID NO: 2987 - DNA, 200 bp, Conyza canadensis
caagtcaaaggttccatggctaaagtaaacattactgatggtttgacaagtcaccaccctccaaggtccagttcttataacttgcgtaattctcttaatagtttgacaatatgttatattgtgaaattctcttaatagtttaactaataggagacgtaaatatcatattacaccaccattttgtagctcttgagcttgtt

SEQ ID NO: 2988 - DNA, 200 bp, Conyza canadensis
aacaagctcaagagctacaaaatggtggtgtaatatgatatttacgtctcctattagttaaactattaagagaatttcacaatataacatattgtcaaactattaagagaattacgcaagttataagaactggaccttggagggtggtgacttgtcaaaccatcagtaatgtttactttagccatggaacctttgacttg

SEQ ID NO: 2989 - DNA, 200 bp, Conyza canadensis
ccattttgtagctcttgagcttgttcctagttcactttccagctcttcaggttgcttttgtaattcatttgactgatggttgttcttctagttaggtgatagataggacccaaaatagggtataagaattgccaaaggattataaataaagatttcacctgatatgtttataatttacagtgattgtattatgtttgtac

SEQ ID NO: 2990 - DNA, 200 bp, Conyza canadensis
gtacaaacataatacaatcactgtaaattataaacatatcaggtgaaatctttatttataatcctttggcaattcttataccctattttgggtcctatctatcacctaactagaagaacaaccatcagtcaaatgaattacaaaagcaacctgaagagctggaaagtgaactaggaacaagctcaagagctacaaaatgg

SEQ ID NO: 2991 - DNA, 200 bp, Conyza canadensis
tacagtgattgtattatgtttgtactaattatgatgtcttgggctgaaatagataggacataggcgtcgggagttgcaaagggtaaaccgaggattgcagggaggaaaacccttgctgatattaacaatattccacagagaggtactgcttcaggtgaagttaacaagtcacagccaagttcagacgctgcaagacatat

SEQ ID NO: 2992 - DNA, 200 bp, Conyza canadensis
atatgtcttgcagcgtctgaacttggctgtgacttgttaacttcacctgaagcagtacctctctgtggaatattgttaatatcagcaagggttttcctccctgcaatcctcggtttaccctttgcaactcccgacgcctatgtcctatctatttcagcccaagacatcataattagtacaaacataatacaatcactgta

SEQ ID NO: 2993 - DNA, 200 bp, Conyza canadensis
caagttcagacgctgcaagacatattatcgagcgacttcaaaaggtacatctttttggttggtcatcttaaagctaaaacatgtcacagttttgttaacatgattcaagtaaatatcatttttttgatacataatatagatagatagatatgttgattcagtaattgaagttgctcatgtatgttatccagaaaaatgca

SEQ ID NO: 2994 - DNA, 200 bp, Conyza canadensis
tgcatttttctggataacatacatgagcaacttcaattactgaatcaacatatctatctatctatattatgtatcaaaaaaatgatatttacttgaatcatgttaacaaaactgtgacatgttttagctttaagatgaccaaccaaaaagatgtaccttttgaagtcgctcgataatatgtcttgcagcgtctgaacttg

SEQ ID NO: 2995 - DNA, 200 bp, Conyza canadensis
catgtatgttatccagaaaaatgcaggatttctgaagcttttgatggataaaaagtatccattgattttcttttacatttcatgttgctatgagaatctgaaaactttaatttggccttataagttaactaatgcttttgcagtaaactaattgaattaagtggagtcgaggtgtaaaaagtgagggccactttgcagat

SEQ ID NO: 2996 - DNA, 200 bp, Conyza canadensis
atctgcaaagtggccctcactttttacacctcgactccacttaattcaattagtttactgcaaaagcattagttaacttataaggccaaattaaagttttcagattctcatagcaacatgaaatgtaaaagaaaatcaatggatactttttatccatcaaaagcttcagaaatcctgcatttttctggataacatacatg

SEQ ID NO: 2997 - DNA, 200 bp, Conyza canadensis
aaaaagtgagggccactttgcagatagtgaaacaaccgaatttgcaacttgctcagtcaaacagccagatttaagcagttagtttacttggcgtagttaatgattgatatactattgaggcattcatttgaatatgactagtatgtgataatgtttcattttatgctgcaggaactaaatttagtcagggaaatggtaag

SEQ ID NO: 2998 - DNA, 200 bp, Conyza canadensis
cttaccatttccctgactaaatttagttcctgcagcataaaatgaaacattatcacatactagtcatattcaaatgaatgcctcaatagtatatcaatcattaactacgccaagtaaactaactgcttaaatctggctgtttgactgagcaagttgcaaattcggttgtttcactatctgcaaagtggccctcacttttt

SEQ ID NO: 2999 - DNA, 200 bp, Conyza canadensis
taaatttagtcagggaaatggtaagtagtccggaagatgctaggcgttttgtcgtcctctttgacatctaagttcttccattggtcatattcataccccatggttttcttgttttatccagcaaaattctttaaagcatgagcttggttgcaaaagcgccttgattattgcaaaaaatctcgagctggaggttagtttag

SEQ ID NO: 3000 - DNA, 200 bp, Conyza canadensis
ctaaactaacctccagctcgagattttttgcaataatcaaggcgcttttgcaaccaagctcatgctttaaagaattttgctggataaaacaagaaaaccatggggtatgaatatgaccaatggaagaacttagatgtcaaagaggacgacaaaacgcctagcatcttccggactacttaccatttccctgactaaattta

SEQ ID NO: 3001 - DNA, 200 bp, Conyza canadensis
aatctcgagctggaggttagtttagtgtaatcttcttcatcggtagcacacttgcatgccccttggtgtatttctctttatttaatgcttgctgtttgagtaagcctggcaaaatgggagggtcgggcgagtttgggtaacgggtcaaagcgggtgcgggtccaaacgggtcatttcataaatgcgtgtcaaacgggtgc

SEQ ID NO: 3002 - DNA, 200 bp, Conyza canadensis
gcacccgtttgacacgcatttatgaaatgacccgtttggacccgcacccgctttgacccgttacccaaactcgcccgaccctcccattttgccaggcttactcaaacagcaagcattaaataaagagaaatacaccaaggggcatgcaagtgtgctaccgatgaagaagattacactaaactaacctccagctcgagatt

SEQ ID NO: 3003 - DNA, 200 bp, Conyza canadensis
tcataaatgcgtgtcaaacgggtgcgggtcgggtgcgtgtcaacccgcatttttggtttttttttaatggtattttaacatgtttataataaagttacaactgcttaagcttttcctatcaatctaccatttttttagctgttaactcgtgacttgtgtgttgacttgttttgtgaatttttgatcgcgacttgtatcgt

SEQ ID NO: 3004 - DNA, 200 bp, Conyza canadensis
acgatacaagtcgcgatcaaaaattcacaaaacaagtcaacacacaagtcacgagttaacagctaaaaaaatggtagattgataggaaaagcttaagcagttgtaactttattataaacatgttaaaataccattaaaaaaaaaccaaaaatgcgggttgacacgcacccgacccgcacccgtttgacacgcatttatga

SEQ ID NO: 3005 - DNA, 200 bp, Conyza canadensis
aatttttgatcgcgacttgtatcgtaagagttataaaatgaaaattacatgacaaaattatataatgtgtaaaaacatacataaattgatatttttaacaaaaatatatgatgcatgtgtaaaaattacatggaaaaaatattacttagatttatttttaaatttaatatatattggatcaaagaaatgaaagaatgcat

SEQ ID NO: 3006 - DNA, 200 bp, Conyza canadensis
atgcattctttcatttctttgatccaatatatattaaatttaaaaataaatctaagtaatattttttccatgtaatttttacacatgcatcatatatttttgttaaaaatatcaatttatgtatgtttttacacattatataattttgtcatgtaattttcattttataactcttacgatacaagtcgcgatcaaaaatt

SEQ ID NO: 3007 - DNA, 200 bp, Conyza canadensis
ggatcaaagaaatgaaagaatgcatcaatgaaaaaatgacaaaaataaataataataataattatattgataataataattattataataatatatatttaagtgaatctgattaaaagttcttttcgttgatgtgagaattgaaaataattaattaaataaggggtgaaataataattcatcttagttaatagattgaa

SEQ ID NO: 3008 - DNA, 200 bp, Conyza canadensis
ttcaatctattaactaagatgaattattatttcaccccttatttaattaattattttcaattctcacatcaacgaaaagaacttttaatcagattcacttaaatatatattattataataattattattatcaatataattattattattatttatttttgtcattttttcattgatgcattctttcatttctttgatcc

SEQ ID NO: 3009 - DNA, 200 bp, Conyza canadensis
aattcatcttagttaatagattgaacatccattaacaagttgagtttactccaaattgaaggtgggtaggtcgtaggtgtactagcgtacactctaacggcagtatgtacgacattaacataaatatatgagtgatcactcaaacttttgaagacctgctcgacccgcaaagctatattgataatttaagagttaaaaat

SEQ ID NO: 3010 - DNA, 200 bp, Conyza canadensis
atttttaactcttaaattatcaatatagctttgcgggtcgagcaggtcttcaaaagtttgagtgatcactcatatatttatgttaatgtcgtacatactgccgttagagtgtacgctagtacacctacgacctacccaccttcaatttggagtaaactcaacttgttaatggatgttcaatctattaactaagatgaatt

SEQ ID NO: 3011 - DNA, 200 bp, Conyza canadensis
tattgataatttaagagttaaaaatgagacccgcttctatcctttttgtaagatccagttgtacccaataaacaaaataaattacccaaacctaatctaatgaaattgggtatggattgccagggctatgtttgagtgtatgttatctcagggaaaagcgaaaaccaagatatgtcaaataaatgaaaatattgtaagta

SEQ ID NO: 3012 - DNA, 200 bp, Conyza canadensis
tacttacaatattttcatttatttgacatatcttggttttcgcttttccctgagataacatacactcaaacatagccctggcaatccatacccaatttcattagattaggtttgggtaatttattttgtttattgggtacaactggatcttacaaaaaggatagaagcgggtctcatttttaactcttaaattatcaata

SEQ ID NO: 3013 - DNA, 200 bp, Conyza canadensis
caaataaatgaaaatattgtaagtacataaacctcaatagtattttagttttgttcaaaatttgttggttcaagttttgtctgctacaatataagatgaaaatttatgtttctatcttgtagacaggtaatgtaactgagccagaggcgaaaaaagtgatccaagtagcagaaagtgacaatgacagaagtagaacgcaa

SEQ ID NO: 3014 - DNA, 200 bp, Conyza canadensis
ttgcgttctacttctgtcattgtcactttctgctacttggatcacttttttcgcctctggctcagttacattacctgtctacaagatagaaacataaattttcatcttatattgtagcagacaaaacttgaaccaacaaattttgaacaaaactaaaatactattgaggtttatgtacttacaatattttcatttatttg

SEQ ID NO: 3015 - DNA, 200 bp, Conyza canadensis
tgacaatgacagaagtagaacgcaaaaatctaaatgtcagaaatctaaaacatgtgaatgatgatttggatgaaatttgtgaagaatggacaaaatatgtgacaaacttcattttccggtcttgaattcaatataacagtggttgtatggatgtgatgaatttttatggttagttttagaatttttaaataacttgtggt

SEQ ID NO: 3016 - DNA, 200 bp, Conyza canadensis
accacaagttatttaaaaattctaaaactaaccataaaaattcatcacatccatacaaccactgttatattgaattcaagaccggaaaatgaagtttgtcacatattttgtccattcttcacaaatttcatccaaatcatcattcacatgttttagatttctgacatttagatttttgcgttctacttctgtcattgtca

SEQ ID NO: 3017 - DNA, 200 bp, Conyza canadensis
ttagaatttttaaataacttgtggttgtatgaaatacattgtttagatatatataaaatgcgtttttttgctatttgtgtatttatttgtattatgagattaactgttatttaatgtgtagagatattaataattttataaaaatatttttttttataaaaaatttgaactatgacacgcaaaaaaggcgacataaatta

SEQ ID NO: 3018 - DNA, 200 bp, Conyza canadensis
taatttatgtcgccttttttgcgtgtcatagttcaaattttttataaaaaaaaatatttttataaaattattaatatctctacacattaaataacagttaatctcataatacaaataaatacacaaatagcaaaaaaacgcattttatatatatctaaacaatgtatttcatacaaccacaagttatttaaaaattctaa

SEQ ID NO: 3019 - DNA, 200 bp, Conyza canadensis
cacgcaaaaaaggcgacataaattagtgtcattaaagtgtgtcgtaaaagagtgtcataaaagcgtgtcataaatttatgacgtgccaaatgcgtgtcataaagatttatgacgggtcgatttatgacaccaaaaatcgtgtcatctgaccccttttatgacaccaaatcggtgtcgttaaaggtgttttttttctagta

SEQ ID NO: 3020 - DNA, 200 bp, Conyza canadensis
tactagaaaaaaaacacctttaacgacaccgatttggtgtcataaaaggggtcagatgacacgatttttggtgtcataaatcgacccgtcataaatctttatgacacgcatttggcacgtcataaatttatgacacgcttttatgacactcttttacgacacactttaatgacactaatttatgtcgccttttttgcgtg

SEQ ID NO: 3021 - DNA, 200 bp, Conyza canadensis
cgttaaaggtgttttttttctagtatcacttttaaatagatatattagatattagaaacattttatcgtgatattgtctttaaataatttaatgacatgataaacttttgatcaaacatatttatgatagagtgatcttcatctttcttttgaattcaccagtcattcgatgggtttcaaggggatcctcgacttttcca

SEQ ID NO: 3022 - DNA, 200 bp, Conyza canadensis
tggaaaagtcgaggatccccttgaaacccatcgaatgactggtgaattcaaaagaaagatgaagatcactctatcataaatatgtttgatcaaaagtttatcatgtcattaaattatttaaagacaatatcacgataaaatgtttctaatatctaatatatctatttaaaagtgatactagaaaaaaaacacctttaacg

SEQ ID NO: 3023 - DNA, 200 bp, Conyza canadensis
ttcaaggggatcctcgacttttccacctttttttatcctaaatgtttgtctactcaagaacaaatcaaagaccaactatctatatcgggagtagcaatcctctataggaaaggccttaccgtttgcataccctaaagtcgtcgttacgcaccagtagtcgatctgagtgttatcgtctactctagaaggtaatcgaccaa

SEQ ID NO: 3024 - DNA, 200 bp, Conyza canadensis
ttggtcgattaccttctagagtagacgataacactcagatcgactactggtgcgtaacgacgactttagggtatgcaaacggtaaggcctttcctatagaggattgctactcccgatatagatagttggtctttgatttgttcttgagtagacaaacatttaggataaaaaaaggtggaaaagtcgaggatccccttgaa

SEQ ID NO: 3025 - DNA, 200 bp, Conyza canadensis
tctactctagaaggtaatcgaccaaatatatttctttatgaagaaaacatttacgacaatcaagtcgttagtcgtatgcagtaacaaactccaatagtgtgcgttttgttttcattttcctctcttaaccatatcttaagttaaagaaaaattattaatcttcttaaagcttttccgaaaatctctaaaatttgacatgt

SEQ ID NO: 3026 - DNA, 200 bp, Conyza canadensis
acatgtcaaattttagagattttcggaaaagctttaagaagattaataatttttctttaacttaagatatggttaagagaggaaaatgaaaacaaaacgcacactattggagtttgttactgcatacgactaacgacttgattgtcgtaaatgttttcttcataaagaaatatatttggtcgattaccttctagagtaga

SEQ ID NO: 3027 - DNA, 200 bp, Conyza canadensis
cgaaaatctctaaaatttgacatgtagatttcattaattttattacttaatctcattttcagattatattattatcataatcttatctctactacctaataaaataaatcacaccccccacaataaatgttttctgcctttaaaattacttatttacccttggacttaccttttttatttttttcttttaatatttaata

SEQ ID NO: 3028 - DNA, 200 bp, Conyza canadensis
tattaaatattaaaagaaaaaaataaaaaaggtaagtccaagggtaaataagtaattttaaaggcagaaaacatttattgtggggggtgtgatttattttattaggtagtagagataagattatgataataatataatctgaaaatgagattaagtaataaaattaatgaaatctacatgtcaaattttagagattttcg

SEQ ID NO: 3029 - DNA, 200 bp, Conyza canadensis
tatttttttcttttaatatttaatattaatacaaaaaactgatttcgacaaataaagtggtcacccatgtttctttagtatctacggtttaagattaatgttggtggatcaattatttttattaaagttacaattttcaattttaataattaagatgtcctttatctttcatttggtaagattaatggataaggaaaagt

SEQ ID NO: 3030 - DNA, 200 bp, Conyza canadensis
acttttccttatccattaatcttaccaaatgaaagataaaggacatcttaattattaaaattgaaaattgtaactttaataaaaataattgatccaccaacattaatcttaaaccgtagatactaaagaaacatgggtgaccactttatttgtcgaaatcagttttttgtattaatattaaatattaaaagaaaaaaata

SEQ ID NO: 3031 - DNA, 200 bp, Conyza canadensis
gtaagattaatggataaggaaaagttttatttataaaacatctgggcataaaatattctagaccgccttccccaccactgtcgccgcattcagggacggttttagcatgggggcattgggggcaaatgcccccattctaattttggtacaatgtaattttttttatataaattctaaaaaacttagtctaaaccgagatt

SEQ ID NO: 3032 - DNA, 200 bp, Conyza canadensis
aatctcggtttagactaagttttttagaatttatataaaaaaaattacattgtaccaaaattagaatgggggcatttgcccccaatgcccccatgctaaaaccgtccctgaatgcggcgacagtggtggggaaggcggtctagaatattttatgcccagatgttttataaataaaacttttccttatccattaatcttac

SEQ ID NO: 3033 - DNA, 200 bp, Conyza canadensis
aaaaaacttagtctaaaccgagattacatataaatgtttctttctttgtcataagtctcttttttggatgtatatatatagtattaccttgtcaaactcgacaataatactgtgtatttagttccccgtcttcatcatgatcatcatcttcttcatttcaaaggctcattttcgaagtatttagatgtagagagtgatga

SEQ ID NO: 3034 - DNA, 200 bp, Conyza canadensis
tcatcactctctacatctaaatacttcgaaaatgagcctttgaaatgaagaagatgatgatcatgatgaagacggggaactaaatacacagtattattgtcgagtttgacaaggtaatactatatatatacatccaaaaaagagacttatgacaaagaaagaaacatttatatgtaatctcggtttagactaagtttttt

SEQ ID NO: 3035 - DNA, 200 bp, Conyza canadensis
agtatttagatgtagagagtgatgaagtgtaaggggtttgtgtttatgattcagagtgtttgaatgtaaaatttcaaagattttgatggtgatggtggttgttgcggtggtggatctcgtggtggttgttgtggttgtttcacatgttgtgaagggaggtatatttgattgttgaatttacagataaactgataaagtga

SEQ ID NO: 3036 - DNA, 200 bp, Conyza canadensis
tcactttatcagtttatctgtaaattcaacaatcaaatatacctcccttcacaacatgtgaaacaaccacaacaaccaccacgagatccaccaccgcaacaaccaccatcaccatcaaaatctttgaaattttacattcaaacactctgaatcataaacacaaaccccttacacttcatcactctctacatctaaatact

SEQ ID NO: 3037 - DNA, 200 bp, Conyza canadensis
atttacagataaactgataaagtgagattgtatatggaagactaaaatcattactcgtatttactaatttaccatctatctagacttgtctttatcaaatggtgaagtgtatattggaaaattccatcaatattttattagttacaccacctacacacattttatagattcaaatattattgtaatttttttaatgtaat

SEQ ID NO: 3038 - DNA, 200 bp, Conyza canadensis
attacattaaaaaaattacaataatatttgaatctataaaatgtgtgtaggtggtgtaactaataaaatattgatggaattttccaatatacacttcaccatttgataaagacaagtctagatagatggtaaattagtaaatacgagtaatgattttagtcttccatatacaatctcactttatcagtttatctgtaaat

SEQ ID NO: 3039 - DNA, 200 bp, Conyza canadensis
attattgtaatttttttaatgtaatattccgtatatttatatatataagtttgatttgatttgtgaaaaattaatgtaggtaagagtacaatatttgaaataaaattgtctacgcgtgaaacaaaattcttttagggtccattttctatcctcgagacgggttttaaaaaatttttattttatctttttagaaacggttt

SEQ ID NO: 3040 - DNA, 200 bp, Conyza canadensis
aaaccgtttctaaaaagataaaataaaaattttttaaaacccgtctcgaggatagaaaatggaccctaaaagaattttgtttcacgcgtagacaattttatttcaaatattgtactcttacctacattaatttttcacaaatcaaatcaaacttatatatataaatatacggaatattacattaaaaaaattacaataat

SEQ ID NO: 3041 - DNA, 200 bp, Conyza canadensis
tattttatctttttagaaacggttttaagaaatataataaagactcttaaatttgccccttcttggaaaaaactctggctccgtcactgactgcattgcgcgggtaccatactcgtaattaaagatgatttttaggttgatttgttagctgtttttttaagttaatatacttatagctttagtttcgtcgtagcgaaaat

SEQ ID NO: 3042 - DNA, 200 bp, Conyza canadensis
attttcgctacgacgaaactaaagctataagtatattaacttaaaaaaacagctaacaaatcaacctaaaaatcatctttaattacgagtatggtacccgcgcaatgcagtcagtgacggagccagagttttttccaagaaggggcaaatttaagagtctttattatatttcttaaaaccgtttctaaaaagataaaata

SEQ ID NO: 3043 - DNA, 200 bp, Conyza canadensis
aaggaaaggcgaaatgaattgggtggggtggaagaggaggtggactgtcatgtcaccagaaaggccatatcacacgctgacgtggcaaaatattgctatattgagtaatttttgaaaggtcatttctaatatcgacaagttttaaaggtgactgctagttgcgtgaattggaccaaagttgctttctattttgtgcggat

SEQ ID NO: 3044 - DNA, 200 bp, Conyza canadensis
atccgcacaaaatagaaagcaactttggtccaattcacgcaactagcagtcacctttaaaacttgtcgatattagaaatgacctttcaaaaattactcaatatagcaatattttgccacgtcagcgtgtgatatggcctttctggtgacatgacagtccacctcctcttccaccccacccaattcatttcgcctttcctt

SEQ ID NO: 3045 - DNA, 200 bp, Conyza canadensis
ctataccttaaattattacattaagggtattataggagtatattagatcgagatgtttaaattagtaaataaagaagaaaaatatttttgattttttaaatgtagaaagtttaaggaaaaagaatttattttattagataatatagattataactagttgaatcgttttataaaacccgactgctttgattaaaatatca

SEQ ID NO: 3046 - DNA, 200 bp, Conyza canadensis
tgatattttaatcaaagcagtcgggttttataaaacgattcaactagttataatctatattatctaataaaataaattctttttccttaaactttctacatttaaaaaatcaaaaatatttttcttctttatttactaatttaaacatctcgatctaatatactcctataatacccttaatgtaataatttaaggtatag

SEQ ID NO: 3047 - DNA, 200 bp, Conyza canadensis
cccgactgctttgattaaaatatcattggttataacttttaaacataggcctcgtgtcacaatccagcttaaagtaaattttgacaaccttaaatcaaaagctcctcaatatataatataaccaaaaaaactcaacaaataaataaatagattaatatatatacctcaacaatggcagccgccgccgtgactacttactc

SEQ ID NO: 3048 - DNA, 200 bp, Conyza canadensis
gagtaagtagtcacggcggcggctgccattgttgaggtatatatattaatctatttatttatttgttgagtttttttggttatattatatattgaggagcttttgatttaaggttgtcaaaatttactttaagctggattgtgacacgaggcctatgtttaaaagttataaccaatgatattttaatcaaagcagtcggg

SEQ ID NO: 3049 - DNA, 200 bp, Conyza canadensis
cagccgccgccgtgactacttactctgccaccgcatttcgtactcgaacaccaccaccaccaccaccgtctgcatccccaatcaactatcatatgcctcaaatggcataccttgtaccttcaccaccatttcttcaaaacccaacagcaaatttgacctcaaaaaactctctgtcaaagcctccaccactggctctgttc

SEQ ID NO: 3050 - DNA, 200 bp, Conyza canadensis
gaacagagccagtggtggaggctttgacagagagttttttgaggtcaaatttgctgttgggttttgaagaaatggtggtgaaggtacaaggtatgccatttgaggcatatgatagttgattggggatgcagacggtggtggtggtggtggtgttcgagtacgaaatgcggtggcagagtaagtagtcacggcggcggctg

SEQ ID NO: 3051 - DNA, 200 bp, Conyza canadensis
aaagcctccaccactggctctgttcccgcccctgttgactcaccttcatccaattcgtctagacccacgtcagccccacctccactccccctttttttattattattaattgtttagattcatttttgctaatcatatatatatatagatttctagtcatatatctatgtttagtcttgttattttatgctgcatttcga

SEQ ID NO: 3052 - DNA, 200 bp, Conyza canadensis
tcgaaatgcagcataaaataacaagactaaacatagatatatgactagaaatctatatatatatatgattagcaaaaatgaatctaaacaattaataataataaaaaaagggggagtggaggtggggctgacgtgggtctagacgaattggatgaaggtgagtcaacaggggcgggaacagagccagtggtggaggcttt

SEQ ID NO: 3053 - DNA, 200 bp, Conyza canadensis
cttgttattttatgctgcatttcgatggggacaatggtaaaaacaatatttacattggtaatgtgtgtgtatagttgtaacatttgcatgtttgttttgtttgtgttttcagtcattatgcaacttagtattcttaaatttatgtttttttcttttcaaatgaggttttgttacggattgatcagtgtagatgagtgaag

SEQ ID NO: 3054 - DNA, 200 bp, Conyza canadensis
cttcactcatctacactgatcaatccgtaacaaaacctcatttgaaaagaaaaaaacataaatttaagaatactaagttgcataatgactgaaaacacaaacaaaacaaacatgcaaatgttacaactatacacacacattaccaatgtaaatattgtttttaccattgtccccatcgaaatgcagcataaaataacaag

SEQ ID NO: 3055 - DNA, 200 bp, Conyza canadensis
gattgatcagtgtagatgagtgaagtgttagcctaagggaatagggatagggaatctcgatgtatcggttgcaatagttattcttctagtgacccacaaaataatttgaagaatgtttgtctagtggggcgtatggggttaccttgctatcgaggtctagggtgagaatcaaactataagtatagaaggttaagatagag

SEQ ID NO: 3056 - DNA, 200 bp, Conyza canadensis
ctctatcttaaccttctatacttatagtttgattctcaccctagacctcgatagcaaggtaaccccatacgccccactagacaaacattcttcaaattattttgtgggtcactagaagaataactattgcaaccgatacatcgagattccctatccctattcccttaggctaacacttcactcatctacactgatcaatc

SEQ ID NO: 3057 - DNA, 200 bp, Conyza canadensis
ataagtatagaaggttaagatagagcttaagccttaaggtgtgagtgagtgaagaataaagcatattttgaagatgatggtgatctttggttgaattgttggatatgtagtcataactagtggggttgctgcctgagcctgcatcgtgtgtcggctactagtatggattctgggacgactacggattgggccccagatac

SEQ ID NO: 3058 - DNA, 200 bp, Conyza canadensis
gtatctggggcccaatccgtagtcgtcccagaatccatactagtagccgacacacgatgcaggctcaggcagcaaccccactagttatgactacatatccaacaattcaaccaaagatcaccatcatcttcaaaatatgctttattcttcactcactcacaccttaaggcttaagctctatcttaaccttctatacttat

SEQ ID NO: 3059 - DNA, 200 bp, Conyza canadensis
cgactacggattgggccccagatacacagtattccctttgtcaggattacacttggagcacaatgcatagtctaggttaatgatgacagagttgccacctactcttgaaatctatagtacacttcaagttgacgttatatcagagagctacttagggtgttctatgttatttaacctctcttgttgatattctctggggt

SEQ ID NO: 3060 - DNA, 200 bp, Conyza canadensis
accccagagaatatcaacaagagaggttaaataacatagaacaccctaagtagctctctgatataacgtcaacttgaagtgtactatagatttcaagagtaggtggcaactctgtcatcattaacctagactatgcattgtgctccaagtgtaatcctgacaaagggaatactgtgtatctggggcccaatccgtagtcg

SEQ ID NO: 3061 - DNA, 200 bp, Conyza canadensis
ctctcttgttgatattctctggggtgttttttgggtatttgattgctcttggatttcgttgattcccttttaagtgatcctggcttttgatttcccctatgaggtcgttgatacccactgaagcttttttggttattgtcccatattaagtttttttgggggcttattggtggtttgatatttgatcacatggtattgta

SEQ ID NO: 3062 - DNA, 200 bp, Conyza canadensis
tacaataccatgtgatcaaatatcaaaccaccaataagcccccaaaaaaacttaatatgggacaataaccaaaaaagcttcagtgggtatcaacgacctcataggggaaatcaaaagccaggatcacttaaaagggaatcaacgaaatccaagagcaatcaaatacccaaaaaacaccccagagaatatcaacaagagag

SEQ ID NO: 3063 - DNA, 200 bp, Conyza canadensis
tgatatttgatcacatggtattgtattttttttcttcaaatattgaagttatgagtgttgtttctaccatgtgataaatatctaagtctatgcttagtaactacatttgatacttaagttagaactggatattgaacttttactaaccgatatggttaactaaacaccataggcattgatatctgatgccatttaattgc

SEQ ID NO: 3064 - DNA, 200 bp, Conyza canadensis
gcaattaaatggcatcagatatcaatgcctatggtgtttagttaaccatatcggttagtaaaagttcaatatccagttctaacttaagtatcaaatgtagttactaagcatagacttagatatttatcacatggtagaaacaacactcataacttcaatatttgaagaaaaaaaatacaataccatgtgatcaaatatca

SEQ ID NO: 3065 - DNA, 200 bp, Conyza canadensis
ttgatatctgatgccatttaattgcgtgtagttatttaaattatttgctttccttatttatactttgtcatttgccttcatatattcttatgaaaggtttacatattaatttctcgatatatctttataaataaagtttaatgtaacacagggtgaggcgccacactatttcagtatttgttggtgatgagagtggaatg

SEQ ID NO: 3066 - DNA, 200 bp, Conyza canadensis
cattccactctcatcaccaacaaatactgaaatagtgtggcgcctcaccctgtgttacattaaactttatttataaagatatatcgagaaattaatatgtaaacctttcataagaatatatgaaggcaaatgacaaagtataaataaggaaagcaaataatttaaataactacacgcaattaaatggcatcagatatcaa

SEQ ID NO: 3067 - DNA, 200 bp, Conyza canadensis
atttgttggtgatgagagtggaatgataaatcggattgcaggagttttcgcaaggaggggatataatatcgagtctcttgctgttggtttaaacaaggacaaagctcttttcactatagttgtatctggaaccgaaagggtgttgcagcaagttatgaaacagcttctaaagcttgttaatgttttgaaggttgacttct

SEQ ID NO: 3068 - DNA, 200 bp, Conyza canadensis
agaagtcaaccttcaaaacattaacaagctttagaagctgtttcataacttgctgcaacaccctttcggttccagatacaactatagtgaaaagagctttgtccttgtttaaaccaacagcaagagactcgatattatatcccctccttgcgaaaactcctgcaatccgatttatcattccactctcatcaccaacaaat

SEQ ID NO: 3069 - DNA, 200 bp, Conyza canadensis
gttaatgttttgaaggttgacttctgtttcaagtttaaaccatcgatccattatggttattttcttttttaagtttctcgaagttgactaccatgaacaggtcgaagatatctcaaaggagccacaagtagaacgtgagttgatgcttatcaagatcaatgcagatccaagttaccgtatggaggtaattatgcaatgtt

SEQ ID NO: 3070 - DNA, 200 bp, Conyza canadensis
aacattgcataattacctccatacggtaacttggatctgcattgatcttgataagcatcaactcacgttctacttgtggctcctttgagatatcttcgacctgttcatggtagtcaacttcgagaaacttaaaaaagaaaataaccataatggatcgatggtttaaacttgaaacagaagtcaaccttcaaaacattaac

SEQ ID NO: 3071 - DNA, 200 bp, Conyza canadensis
cgtatggaggtaattatgcaatgttaatcatgtttgggtttttggctgttattcataacatactacattattctgattcatggagacgaacatatttccatgacgggggtgttttagatatgccatttaaattgttcatatgattagtgtgacctttagtactgataacataagtgtttggataaacagattttgcttat

SEQ ID NO: 3072 - DNA, 200 bp, Conyza canadensis
ataagcaaaatctgtttatccaaacacttatgttatcagtactaaaggtcacactaatcatatgaacaatttaaatggcatatctaaaacacccccgtcatggaaatatgttcgtctccatgaatcagaataatgtagtatgttatgaataacagccaaaaacccaaacatgattaacattgcataattacctccatacg

SEQ ID NO: 3073 - DNA, 200 bp, Conyza canadensis
gtttggataaacagattttgcttatgactgtattatgattatctagtggacaagtaaaatgtgtgagaatatgttatctcaccatattcttatggttttgattttcaggttaagtggttagtggacatctttagagctagaatcgttgatatctcacaggactcgctaacaatcgaggtgatggaagttgaaattttact

SEQ ID NO: 3074 - DNA, 200 bp, Conyza canadensis
agtaaaatttcaacttccatcacctcgattgttagcgagtcctgtgagatatcaacgattctagctctaaagatgtccactaaccacttaacctgaaaatcaaaaccataagaatatggtgagataacatattctcacacattttacttgtccactagataatcataatacagtcataagcaaaatctgtttatccaaac

SEQ ID NO: 3075 - DNA, 200 bp, Conyza canadensis
aggtgatggaagttgaaattttactttaacctttaaagtgtttactgttttttcaggcacaactgatctggactcagttttgggtctttatgtattgtaatttacaaaagtataatgctctatagaggacctgtgttagtttgtaatttttcaatgacctttttgataaatatgaaattcgtacacactttgactctttg

SEQ ID NO: 3076 - DNA, 200 bp, Conyza canadensis
caaagagtcaaagtgtgtacgaatttcatatttatcaaaaaggtcattgaaaaattacaaactaacacaggtcctctatagagcattatacttttgtaaattacaatacataaagacccaaaactgagtccagatcagttgtgcctgaaaaaacagtaaacactttaaaggttaaagtaaaatttcaacttccatcacct

SEQ ID NO: 3077 - DNA, 200 bp, Conyza canadensis
aattcgtacacactttgactctttggaatttaggtaactggtgacccagggaaaatggttgcagtgcaaagaaacctgagtaaatttgggattcgagaagttgcaaggactggaaaagtaagttattattaagtctctattttttcctattcttctttcatattgattgttaaattctgtatgccttagattgctttgag

SEQ ID NO: 3078 - DNA, 200 bp, Conyza canadensis
ctcaaagcaatctaaggcatacagaatttaacaatcaatatgaaagaagaataggaaaaaatagagacttaataataacttacttttccagtccttgcaacttctcgaatcccaaatttactcaggtttctttgcactgcaaccattttccctgggtcaccagttacctaaattccaaagagtcaaagtgtgtacgaatt

SEQ ID NO: 3079 - DNA, 200 bp, Conyza canadensis
tctgtatgccttagattgctttgagaagagaaaaaatgggcgaggatgctcctttctggcgtttttcagcagcttcatatccagaccttgaagaaatgaacgcaagaactactcttcaggccaaaaaaagtgcagaatttatagaaaccgatatgtctgttggggtaagttgctttctctttttgactgacgctaacctg

SEQ ID NO: 3080 - DNA, 200 bp, Conyza canadensis
caggttagcgtcagtcaaaaagagaaagcaacttaccccaacagacatatcggtttctataaattctgcactttttttggcctgaagagtagttcttgcgttcatttcttcaaggtctggatatgaagctgctgaaaaacgccagaaaggagcatcctcgcccattttttctcttctcaaagcaatctaaggcatacaga

SEQ ID NO: 3081 - DNA, 200 bp, Conyza canadensis
tctctttttgactgacgctaacctgggttgtagaggttgcaaattagttgggaaattgggtcaaagcggaatttttttttgcggatcggctaatgttgacctgaattggtgtttgtcccaagttcagtttgatcttttatacataattagtttgtaaaacataactaaactttttatatatgtaaatgcaactatacggc

SEQ ID NO: 3082 - DNA, 200 bp, Conyza canadensis
gccgtatagttgcatttacatatataaaaagtttagttatgttttacaaactaattatgtataaaagatcaaactgaacttgggacaaacaccaattcaggtcaacattagccgatccgcaaaaaaaaattccgctttgacccaatttcccaactaatttgcaacctctacaacccaggttagcgtcagtcaaaaagaga

SEQ ID NO: 3083 - DNA, 200 bp, Conyza canadensis
atatatgtaaatgcaactatacggcattgcttttcaacaaaatgatgtaggaggcaccattgaaaagaaagattttagtggttttatgcttaaaactacatttggcaactttcagccgaagctctttgtttttaaacttatttgctttactcgtttgacccgttataatataaattagtctggttcgacgattatctatc

SEQ ID NO: 3084 - DNA, 200 bp, Conyza canadensis
gatagataatcgtcgaaccagactaatttatattataacgggtcaaacgagtaaagcaaataagtttaaaaacaaagagcttcggctgaaagttgccaaatgtagttttaagcataaaaccactaaaatctttcttttcaatggtgcctcctacatcattttgttgaaaagcaatgccgtatagttgcatttacatatat

SEQ ID NO: 3085 - DNA, 200 bp, Conyza canadensis
tagtctggttcgacgattatctatcttgcacgatgtagtttagacttgaatacttcatacacagatggtgaatgaggtggtatttcttatctgtattaaattatatttgtgaagggagatgtttatccagtagagcaaggagatgactttccatttaatcaagttcttgatgcacactggggtgttcttaacgaagaaga

SEQ ID NO: 3086 - DNA, 200 bp, Conyza canadensis
tcttcttcgttaagaacaccccagtgtgcatcaagaacttgattaaatggaaagtcatctccttgctctactggataaacatctcccttcacaaatataatttaatacagataagaaataccacctcattcaccatctgtgtatgaagtattcaagtctaaactacatcgtgcaagatagataatcgtcgaaccagacta

SEQ ID NO: 3087 - DNA, 200 bp, Conyza canadensis
actggggtgttcttaacgaagaagatgtaagaacttgatatcacttctcatatttcacaaatgtcactgaggtgcattgaagtatcagtaatttttagtttgatgtttctagacaagcgggcttcggtcacacactttatcgatggttgtaaatgactctcccggagttttaaatatagtaacaggagtttttgctcgta

SEQ ID NO: 3088 - DNA, 200 bp, Conyza canadensis
tacgagcaaaaactcctgttactatatttaaaactccgggagagtcatttacaaccatcgataaagtgtgtgaccgaagcccgcttgtctagaaacatcaaactaaaaattactgatacttcaatgcacctcagtgacatttgtgaaatatgagaagtgatatcaagttcttacatcttcttcgttaagaacaccccagt

SEQ ID NO: 3089 - DNA, 200 bp, Conyza canadensis
atagtaacaggagtttttgctcgtagaggttacaatattcaggtatgttttttgtattccggatatttcattaatttgcttcctgaacatatggaagtaccagaggttcaagtagtttggtgtttgcatttttgattcagagtctagcagttggtcatgcagaagttgaagggcgatcccgcatcacaactgtcgttccc

SEQ ID NO: 3090 - DNA, 200 bp, Conyza canadensis
gggaacgacagttgtgatgcgggatcgcccttcaacttctgcatgaccaactgctagactctgaatcaaaaatgcaaacaccaaactacttgaacctctggtacttccatatgttcaggaagcaaattaatgaaatatccggaatacaaaaaacatacctgaatattgtaacctctacgagcaaaaactcctgttactat

SEQ ID NO: 3091 - DNA, 200 bp, Conyza canadensis
atcccgcatcacaactgtcgttcccggtacaaatgagtctatcagcaagttggttcaacaactatacaagttgatagatgttcatgatgtgagtatatattgtagttggaaaatgcttcatatgttaagtttattatgaatgagcagtactactagtctcattttccgccctccaaggtccatttgtagttgtttacgac

SEQ ID NO: 3092 - DNA, 200 bp, Conyza canadensis
gtcgtaaacaactacaaatggaccttggagggcggaaaatgagactagtagtactgctcattcataataaacttaacatatgaagcattttccaactacaatatatactcacatcatgaacatctatcaacttgtatagttgttgaaccaacttgctgatagactcatttgtaccgggaacgacagttgtgatgcgggat

SEQ ID NO: 3093 - DNA, 200 bp, Conyza canadensis
aggtccatttgtagttgtttacgacccagttcttatggaaaggtagatatgggctgtgctggtaaaattgaaaggtttaactaataaggaaacaggtcaagtggttcgaacaggttgaaagtttcccagagagtgatactcgtataattattgtaattctcttgatcgcttttatcaccagtctgtaaaaaacgaaaaag

SEQ ID NO: 3094 - DNA, 200 bp, Conyza canadensis
ctttttcgttttttacagactggtgataaaagcgatcaagagaattacaataattatacgagtatcactctctgggaaactttcaacctgttcgaaccacttgacctgtttccttattagttaaacctttcaattttaccagcacagcccatatctacctttccataagaactgggtcgtaaacaactacaaatggacct

SEQ ID NO: 3095 - DNA, 200 bp, Conyza canadensis
caccagtctgtaaaaaacgaaaaagtttgacaagatgtgtttcacttcaaataggttatagaaaaatagatttattaaaataatgtaatttttgttattttatttgacccaaaaggactttgaatagtaccaaaaggactcttcattgacccagtacccacctgtctgttttgtcacccctacccatttggttgctattg

SEQ ID NO: 3096 - DNA, 200 bp, Conyza canadensis
caatagcaaccaaatgggtaggggtgacaaaacagacaggtgggtactgggtcaatgaagagtccttttggtactattcaaagtccttttgggtcaaataaaataacaaaaattacattattttaataaatctatttttctataacctatttgaagtgaaacacatcttgtcaaactttttcgttttttacagactggtg

SEQ ID NO: 3097 - DNA, 200 bp, Conyza canadensis
acccctacccatttggttgctattgatactactgaggagatataattattctattacaccaccattttgtagctcttgatctggtttctagttcacattccagctcttgaggctgcttttctaattcatttgactgatacttgtttttctgtttaggtgatagacctaacatccgtgccatttgctgagcgagagttaat

SEQ ID NO: 3098 - DNA, 200 bp, Conyza canadensis
attaactctcgctcagcaaatggcacggatgttaggtctatcacctaaacagaaaaacaagtatcagtcaaatgaattagaaaagcagcctcaagagctggaatgtgaactagaaaccagatcaagagctacaaaatggtggtgtaatagaataattatatctcctcagtagtatcaatagcaaccaaatgggtaggggt

SEQ ID NO: 3099 - DNA, 200 bp, Conyza canadensis
tgccatttgctgagcgagagttaatgctgattaaagttgccgtcaattccacagctcgacgcagtgttcttgatattgcaagcatatttagagctaaagccgtagatgtatcagatcacacaattacactcgaggtgaaatttaaatataattcacttgcatattacacgtgttgactgaaatttcatgatcctactatt

SEQ ID NO: 3100 - DNA, 200 bp, Conyza canadensis
aatagtaggatcatgaaatttcagtcaacacgtgtaatatgcaagtgaattatatttaaatttcacctcgagtgtaattgtgtgatctgatacatctacggctttagctctaaatatgcttgcaatatcaagaacactgcgtcgagctgtggaattgacggcaactttaatcagcattaactctcgctcagcaaatggca

SEQ ID NO: 3101 - DNA, 200 bp, Conyza canadensis
actgaaatttcatgatcctactattgaacgttacaaaatttcatgatccttacctttattttcacagtttttctgtttttctttccccgttgggttgtttcagcaataaattgtttttcttgtattttccaggtcactggagatgtaaataagatggtagcattacagagactgttagagccatgtggaatttgcgaggt

SEQ ID NO: 3102 - DNA, 200 bp, Conyza canadensis
acctcgcaaattccacatggctctaacagtctctgtaatgctaccatcttatttacatctccagtgacctggaaaatacaagaaaaacaatttattgctgaaacaacccaacggggaaagaaaaacagaaaaactgtgaaaataaaggtaaggatcatgaaattttgtaacgttcaatagtaggatcatgaaatttcagt

SEQ ID NO: 3103 - DNA, 200 bp, Conyza canadensis
tagagccatgtggaatttgcgaggtttgtttgtgaaatctgttatttataatatttctatttgaacatgtcaccttccagtttaaaacccacagcttggtttgctcatttggaaccatgaacaatctcattgttcgtgaccaaactacagttctagatctgaactagagtggtcagtctttttgtgttgcagtcctattt

SEQ ID NO: 3104 - DNA, 200 bp, Conyza canadensis
aaataggactgcaacacaaaaagactgaccactctagttcagatctagaactgtagtttggtcacgaacaatgagattgttcatggttccaaatgagcaaaccaagctgtgggttttaaactggaaggtgacatgttcaaatagaaatattataaataacagatttcacaaacaaacctcgcaaattccacatggctcta

SEQ ID NO: 3105 - DNA, 200 bp, Conyza canadensis
gtctttttgtgttgcagtcctatttacttaatccttgatcattatttgtaggttgcaagaacagggagggtggcactgtctcgtgagtctggtgttgattcatcttaccttcgtggctattcctatcccgtttgattcagtcatttagagtgtctttttgtttttggttgctcggagtatagaattatatattttcaatg

SEQ ID NO: 3106 - DNA, 200 bp, Conyza canadensis
cattgaaaatatataattctatactccgagcaaccaaaaacaaaaagacactctaaatgactgaatcaaacgggataggaatagccacgaaggtaagatgaatcaacaccagactcacgagacagtgccaccctccctgttcttgcaacctacaaataatgatcaaggattaagtaaataggactgcaacacaaaaagac

SEQ ID NO: 3107 - DNA, 200 bp, Conyza canadensis
agtatagaattatatattttcaatgattgaatatctacaagtcgttttagcatgtatgttttaatcaaagctgctgttttgaatgagggtttggtatgaacccaatttgaaagattttgttttttctttaaataggcgcctaagctcaacaagggcacatggttagattggttgaactagttttttagggaaacatgttc

SEQ ID NO: 3108 - DNA, 200 bp, Conyza canadensis
gaacatgtttccctaaaaaactagttcaaccaatctaaccatgtgcccttgttgagcttaggcgcctatttaaagaaaaaacaaaatctttcaaattgggttcataccaaaccctcattcaaaacagcagctttgattaaaacatacatgctaaaacgacttgtagatattcaatcattgaaaatatataattctatact

SEQ ID NO: 3109 - DNA, 200 bp, Conyza canadensis
actagttttttagggaaacatgttcctcatcaagttctaatttgcaagattgaccgaacccatgtccctgccattttttccgttcatgtcttgagccgaagttataactcaggtttaagcacaccctcattaaaactcttctaataaattgaatggaatttttagtcctcaaatatcctcgcgagattttagctcgtgat

SEQ ID NO: 3110 - DNA, 200 bp, Conyza canadensis
atcacgagctaaaatctcgcgaggatatttgaggactaaaaattccattcaatttattagaagagttttaatgagggtgtgcttaaacctgagttataacttcggctcaagacatgaacggaaaaaatggcagggacatgggttcggtcaatcttgcaaattagaacttgatgaggaacatgtttccctaaaaaactagt

SEQ ID NO: 3111 - DNA, 200 bp, Conyza canadensis
tcctcgcgagattttagctcgtgatttatgctgcccacagagaatatgtggtttttgatgaccctatttttcagttaatttccaaacatcatccaccaattccactctttttgggagtcaaaatttattgacaaaattagaaagagagaaacaaccaaaaatcatagaggaattaaaaataaaaatatgaaaaaagatga

SEQ ID NO: 3112 - DNA, 200 bp, Conyza canadensis
tcatcttttttcatatttttatttttaattcctctatgatttttggttgtttctctctttctaattttgtcaataaattttgactcccaaaaagagtggaattggtggatgatgtttggaaattaactgaaaaatagggtcatcaaaaaccacatattctctgtgggcagcataaatcacgagctaaaatctcgcgagga

SEQ ID NO: 3113 - DNA, 200 bp, Conyza canadensis
aaaataaaaatatgaaaaaagatgatctaacatgagaatggacatcgaacatggaatataatgttaacaaatatccacaaagactgaattaatcagagaatgtggcttcagaaaagcggaagtagtttgcagggtggtgatcgaatgcagaggaagggaactggaaccgccatggttgcggtggctatagacaaggacaa

SEQ ID NO: 3114 - DNA, 200 bp, Conyza canadensis
ttgtccttgtctatagccaccgcaaccatggcggttccagttcccttcctctgcattcgatcaccaccctgcaaactacttccgcttttctgaagccacattctctgattaattcagtctttgtggatatttgttaacattatattccatgttcgatgtccattctcatgttagatcatcttttttcatatttttatttt

SEQ ID NO: 3115 - DNA, 200 bp, Conyza canadensis
ttgcggtggctatagacaaggacaaatacagccagcaagcgcttaaatggtccattgaacatcttcttacccgtggacaaaccgttgtcctcattcatgtcatccggaaaacccctcctacaggcaatatttgtattctgtcaaacgattcagatattaacattgtttataacaactaattgaaaaaaagagagagagag

SEQ ID NO: 3116 - DNA, 200 bp, Conyza canadensis
ctctctctctctttttttcaattagttgttataaacaatgttaatatctgaatcgtttgacagaatacaaatattgcctgtaggaggggttttccggatgacatgaatgaggacaacggtttgtccacgggtaagaagatgttcaatggaccatttaagcgcttgctggctgtatttgtccttgtctatagccaccgcaa

SEQ ID NO: 3117 - DNA, 200 bp, Conyza canadensis
ctaattgaaaaaaagagagagagagagagaaccttataatcccatatcaatttcaactatttgaccaatatataacccctaacacgattgttgagtcacataatccttgaaacaagataaaacaattagactgcgttaagttacagaaaacgttttctaattttccacttagaattcataagaaaatggaaggggttttt

SEQ ID NO: 3118 - DNA, 200 bp, Conyza canadensis
aaaaaccccttccattttcttatgaattctaagtggaaaattagaaaacgttttctgtaacttaacgcagtctaattgttttatcttgtttcaaggattatgtgactcaacaatcgtgttaggggttatatattggtcaaatagttgaaattgatatgggattataaggttctctctctctctctctttttttcaattag

SEQ ID NO: 3119 - DNA, 200 bp, Conyza canadensis
tcataagaaaatggaaggggttttttagttctagaaacttaaacttctgaaaatgcgtttagttgtaagtggaaaacgtaaggagtttttcatttttaaataacagatgtgccaatatgaatgtagggggagggattgatgcatctgctgcaaacaagcaacaaactgagaagcaaacaagagatttgttcctcacgttc

SEQ ID NO: 3120 - DNA, 200 bp, Conyza canadensis
gaacgtgaggaacaaatctcttgtttgcttctcagtttgttgcttgtttgcagcagatgcatcaatccctccccctacattcatattggcacatctgttatttaaaaatgaaaaactccttacgttttccacttacaactaaacgcattttcagaagtttaagtttctagaactaaaaaaccccttccattttcttatga

SEQ ID NO: 3121 - DNA, 200 bp, Conyza canadensis
aacaagagatttgttcctcacgttccattgcttctgtacgcgtaaagaagtacgtgttttactactatctgtcttgttgggtatcttttgcatggttttgctaaaattgttgcactgcagatacagtgttacgatgttatacttgaagatgcaaatatagcaaaagcactcacggaatatgcatcttatgctgccataga

SEQ ID NO: 3122 - DNA, 200 bp, Conyza canadensis
tctatggcagcataagatgcatattccgtgagtgcttttgctatatttgcatcttcaagtataacatcgtaacactgtatctgcagtgcaacaattttagcaaaaccatgcaaaagatacccaacaagacagatagtagtaaaacacgtacttctttacgcgtacagaagcaatggaacgtgaggaacaaatctcttgtt

SEQ ID NO: 3123 - DNA, 200 bp, Conyza canadensis
aatatgcatcttatgctgccatagaatatttggtccttggtgcctcatcacggcatggtttcatcaggtcatttattcaaatgaaatttttgcaaaacctttaaatgttttaacgattatcacctttgagttaatattgtaagcatttctataatgatagctgaatgcttggactaatgagtaacgattaaaacatttat

SEQ ID NO: 3124 - DNA, 200 bp, Conyza canadensis
ataaatgttttaatcgttactcattagtccaagcattcagctatcattatagaaatgcttacaatattaactcaaaggtgataatcgttaaaacatttaaaggttttgcaaaaatttcatttgaataaatgacctgatgaaaccatgccgtgatgaggcaccaaggaccaaatattctatggcagcataagatgcatatt

SEQ ID NO: 3125 - DNA, 200 bp, Conyza canadensis
aatgagtaacgattaaaacatttataaacagatttcggagttctgatgtgccaagccaagtaatgaaatcgataccagatttctgcactgtttatgtcatctcaaaaggaaagatatcctcagcaaagaaatcttcacgaacagtcccgtttccatctcctatacgtgagaaaatagaagaacaatctaacaccaacttt

SEQ ID NO: 3126 - DNA, 200 bp, Conyza canadensis
aaagttggtgttagattgttcttctattttctcacgtataggagatggaaacgggactgttcgtgaagatttctttgctgaggatatctttccttttgagatgacataaacagtgcagaaatctggtatcgatttcattacttggcttggcacatcagaactccgaaatctgtttataaatgttttaatcgttactcatt

SEQ ID NO: 3127 - DNA, 200 bp, Conyza canadensis
agaagaacaatctaacaccaactttgaagcaagtgtacgccgcaagaatagttttaacattaaaagtcagtcatttattttcagtttaaatacaatacattcccaaaagttatcttgtttttcatgactcaaagaacttgtgaacagaaccagaaatcgcgccagagaagccactacttccggcaccagaagaccctgaa

SEQ ID NO: 3128 - DNA, 200 bp, Conyza canadensis
ttcagggtcttctggtgccggaagtagtggcttctctggcgcgatttctggttctgttcacaagttctttgagtcatgaaaaacaagataacttttgggaatgtattgtatttaaactgaaaataaatgactgacttttaatgttaaaactattcttgcggcgtacacttgcttcaaagttggtgttagattgttcttct

SEQ ID NO: 3129 - DNA, 200 bp, Conyza canadensis
ctctctctctactttctattgttttctcttgagaaaaagttggaacctttttctcagaaaaagtgagaaaacttgcgttgggaagggccttaccaactttatatacacatagaattcagttgtgttgcatacttgcatgaggcataagataataagggagctcaaattctgacattaatggaatttcaccctaacaataa

SEQ ID NO: 3130 - DNA, 200 bp, Conyza canadensis
ttattgttagggtgaaattccattaatgtcagaatttgagctcccttattatcttatgcctcatgcaagtatgcaacacaactgaattctatgtgtatataaagttggtaaggcccttcccaacgcaagttttctcactttttctgagaaaaaggttccaactttttctcaagagaaaacaatagaaagtagagagagag

SEQ ID NO: 3131 - DNA, 200 bp, Conyza canadensis
taatggaatttcaccctaacaataatatctccattctcttcaaatccgatccttagttttctacagccacatcatcgccacatcatacacatatattatacatacacaaattcaaaaattctctcgtcttcccgaggataccatcccagaacttgggtagaacgacttcgtaactataaagttttgagaaagcagcttcg

SEQ ID NO: 3132 - DNA, 200 bp, Conyza canadensis
cgaagctgctttctcaaaactttatagttacgaagtcgttctacccaagttctgggatggtatcctcgggaagacgagagaatttttgaatttgtgtatgtataatatatgtgtatgatgtggcgatgatgtggctgtagaaaactaaggatcggatttgaagagaatggagatattattgttagggtgaaattccatta

SEQ ID NO: 3133 - DNA, 200 bp, Conyza canadensis
ataaagttttgagaaagcagcttcggaacatagaagaacgtgctccagaacgtgtggtggcaataaagacacgagaacttgggttctagaacgccttaattattatcttaatcattatcatttagtatcatactagattttagacccgtgtcaaatacccgggttttacaacattattgatataagaattagtatatgga

SEQ ID NO: 3134 - DNA, 200 bp, Conyza canadensis
tccatatactaattcttatatcaataatgttgtaaaacccgggtatttgacacgggtctaaaatctagtatgatactaaatgataatgattaagataataattaaggcgttctagaacccaagttctcgtgtctttattgccaccacacgttctggagcacgttcttctatgttccgaagctgctttctcaaaactttat

SEQ ID NO: 3135 - DNA, 200 bp, Conyza canadensis
attgatataagaattagtatatggaaaaaaattatacgttaaatgtaaaaatacacttaaaaaaactgagatatttaaatgttaatactgaatgctaaatcatataattaaggctggatggtgtaacaaagttgtctttgatacacacttttatagaaaagcaatatcttaactttgattacactattgactgagttttc

SEQ ID NO: 3136 - DNA, 200 bp, Conyza canadensis
gaaaactcagtcaatagtgtaatcaaagttaagatattgcttttctataaaagtgtgtatcaaagacaactttgttacaccatccagccttaattatatgatttagcattcagtattaacatttaaatatctcagtttttttaagtgtatttttacatttaacgtataatttttttccatatactaattcttatatcaat

SEQ ID NO: 3137 - DNA, 200 bp, Conyza canadensis
tgattacactattgactgagttttcattgatgtcttgcaaaaaagtaattttattttttgtcagacatgattgttaagaacaataaaagtagcggctgtttcgcgagatttttaaagatttcgtttattgttatttttttttatgttcaatttatataaaaaaaatctatatcctaataaatatagtttgattccaatta

SEQ ID NO: 3138 - DNA, 200 bp, Conyza canadensis
taattggaatcaaactatatttattaggatatagattttttttatataaattgaacataaaaaaaaataacaataaacgaaatctttaaaaatctcgcgaaacagccgctacttttattgttcttaacaatcatgtctgacaaaaaataaaattacttttttgcaagacatcaatgaaaactcagtcaatagtgtaatca

SEQ ID NO: 3139 - DNA, 200 bp, Conyza canadensis
aataaatatagtttgattccaattaataataacaacaatgattatcctaattttagtctgattaggaatagtaataatatttgattatagttaataatataaaataaaatattgatataaatatgtaaacttactaacttttagctatattttgttattaaattagatattatgcaataaaatattaattatttttaaat

SEQ ID NO: 3140 - DNA, 200 bp, Conyza canadensis
atttaaaaataattaatattttattgcataatatctaatttaataacaaaatatagctaaaagttagtaagtttacatatttatatcaatattttattttatattattaactataatcaaatattattactattcctaatcagactaaaattaggataatcattgttgttattattaattggaatcaaactatatttatt

SEQ ID NO: 3141 - DNA, 200 bp, Conyza canadensis
tggccattacggccggggctgcagattggaactaccacctaaactgctttctttcactaaatcaagtgttggtcgaaggcttgcttttaagctggttaatgctatctccgactccggtaatggagctccggcttcacttctttctacttcttcccttaatggagttactgccccgccactttcttccaaggtgaagcgcc

SEQ ID NO: 3142 - DNA, 200 bp, Conyza canadensis
ggcgcttcaccttggaagaaagtggcggggcagtaactccattaagggaagaagtagaaagaagtgaagccggagctccattaccggagtcggagatagcattaaccagcttaaaagcaagccttcgaccaacacttgatttagtgaaagaaagcagtttaggtggtagttccaatctgcagccccggccgtaatggcca

SEQ ID NO: 3143 - DNA, 200 bp, Conyza canadensis
ccactttcttccaaggtgaagcgccacactatctcggtgttcgtaggagatgaaagtggtattataaaccgaatcgcaggagttttcgctagaagaggttataatatcgagtcacttgctgttggtttaaacaaggacaaggctttgtttactatagttgtttctggaactgaaaaggtcttgcaacaagtggtggagca

SEQ ID NO: 3144 - DNA, 200 bp, Conyza canadensis
tgctccaccacttgttgcaagaccttttcagttccagaaacaactatagtaaacaaagccttgtccttgtttaaaccaacagcaagtgactcgatattataacctcttctagcgaaaactcctgcgattcggtttataataccactttcatctcctacgaacaccgagatagtgtggcgcttcaccttggaagaaagtgg

SEQ ID NO: 3145 - DNA, 200 bp, Conyza canadensis
aggtcttgcaacaagtggtggagcagctcaacaagcttgtgaacgtcataaaggtggaagacctttccaaggaaccacaggtagaacgggaattgatgcttgtgaagcttaatgtagatccaaccacacgagctgagattatgtggctagtagacgtctttagagccaacgttgtggatgcatcagaaagctcgttgact

SEQ ID NO: 3146 - DNA, 200 bp, Conyza canadensis
agtcaacgagctttctgatgcatccacaacgttggctctaaagacgtctactagccacataatctcagctcgtgtggttggatctacattaagcttcacaagcatcaattcccgttctacctgtggttccttggaaaggtcttccacctttatgacgttcacaagcttgttgagctgctccaccacttgttgcaagacct

SEQ ID NO: 3147 - DNA, 200 bp, Conyza canadensis
ggatgcatcagaaagctcgttgactatagaggttaccggggatcctgggaagattgttgctgttcagagaaatttagccaagttcggaatccaagagctcactagaacaggaaagatcgctctaagacgggaaaaactgggtgaaactgctccattttggaacttctctgcagcatcttacccagatctagaatccgcaa

SEQ ID NO: 3148 - DNA, 200 bp, Conyza canadensis
ttgcggattctagatctgggtaagatgctgcagagaagttccaaaatggagcagtttcacccagtttttcccgtcttagagcgatctttcctgttctagtgagctcttggattccgaacttggctaaatttctctgaacagcaacaatcttcccaggatccccggtaacctctatagtcaacgagctttctgatgcatcc

SEQ ID NO: 3149 - DNA, 200 bp, Conyza canadensis
tcttacccagatctagaatccgcaactccaattgctacttcttcaagtgttacttgcactgttgatgaggattcgactgcaatgtcagggggtgatgtgtatcctgtggagtacaacaatagctgcataatggatcaagttcttgacgccaattggggggtagtctatgatgaagattcaactggtcggcagtctcatac

SEQ ID NO: 3150 - DNA, 200 bp, Conyza canadensis
gtatgagactgccgaccagttgaatcttcatcatagactaccccccaattggcgtcaagaacttgatccattatgcagctattgttgtactccacaggatacacatcaccccctgacattgcagtcgaatcctcatcaacagtgcaagtaacacttgaagaagtagcaattggagttgcggattctagatctgggtaaga

SEQ ID NO: 3151 - DNA, 200 bp, Conyza canadensis
attcaactggtcggcagtctcatactttaaacattctggtcaatgatactcctggagttctcaacgtggtcagtggagttatatccagaaggggttacaacattcagagtctggccgtaggtccagcagaaatggagggtttatctcgcattacgactgtgattgctggtacagatgaatctatttacaagttggttcag

SEQ ID NO: 3152 - DNA, 200 bp, Conyza canadensis
ctgaaccaacttgtaaatagattcatctgtaccagcaatcacagtcgtaatgcgagataaaccctccatttctgctggacctacggccagactctgaatgttgtaaccccttctggatataactccactgaccacgttgagaactccaggagtatcattgaccagaatgtttaaagtatgagactgccgaccagttgaat

SEQ ID NO: 3153 - DNA, 200 bp, Conyza canadensis
tgaatctatttacaagttggttcagcagttccgcaaattggtggatgttcatgaggtcaaagatatcacccatctaccatttgcagaacgtgagctaatgttaattaaagttgctgctagctctgctgttcgaagggatgtcctagacatcgccaccatctttcgagccaagcctgttgatgtttctgatcacactctca

SEQ ID NO: 3154 - DNA, 200 bp, Conyza canadensis
tgagagtgtgatcagaaacatcaacaggcttggctcgaaagatggtggcgatgtctaggacatcccttcgaacagcagagctagcagcaactttaattaacattagctcacgttctgcaaatggtagatgggtgatatctttgacctcatgaacatccaccaatttgcggaactgctgaaccaacttgtaaatagattca

SEQ ID NO: 3155 - DNA, 200 bp, Conyza canadensis
gttgatgtttctgatcacactctcacactagaactcacaggagacttcaacaagttgtttgcattgcaaagattgttagagtcctatggaatttgtgaggtcgcaaggactggtcgagtggcattggtgcgagagtcaggggtcgattctacatatctacgtgggtactcccttccgttataataacaccggaagttatc

SEQ ID NO: 3156 - DNA, 200 bp, Conyza canadensis
gataacttccggtgttattataacggaagggagtacccacgtagatatgtagaatcgacccctgactctcgcaccaatgccactcgaccagtccttgcgacctcacaaattccataggactctaacaatctttgcaatgcaaacaacttgttgaagtctcctgtgagttctagtgtgagagtgtgatcagaaacatcaac

SEQ ID NO: 3157 - DNA, 200 bp, Conyza canadensis
cgttataataacaccggaagttatccctcaattgtatgttgcattattgtagctgcaagtgaacacaactgttcagtgtcttttgcactgatggctgcggatgtgagagtatgacttcttgctagaaaaagaaaaaaggaatgtttagtagatcaatttatgttgtattatggtatgccgtgtgatgtcaaaactgtaac

SEQ ID NO: 3158 - DNA, 200 bp, Conyza canadensis
gttacagttttgacatcacacggcataccataatacaacataaattgatctactaaacattccttttttctttttctagcaagaagtcatactctcacatccgcagccatcagtgcaaaagacactgaacagttgtgttcacttgcagctacaataatgcaacatacaattgagggataacttccggtgttattataacg

SEQ ID NO: 3159 - DNA, 200 bp, Conyza canadensis
ttagattagggtcttgcttacaatgttgttatttaaattgtacatttttgtcagtaattttagtgtaaccgaggtatttagctcaactttttttggggttaattgtttcaactactcgtaaccgaattttgattgttgtttaagattctcttgcaacaaagttctcaactttaagcctatagtatgaacatatttccttg

SEQ ID NO: 3160 - DNA, 200 bp, Conyza canadensis
caaggaaatatgttcatactataggcttaaagttgagaactttgttgcaagagaatcttaaacaacaatcaaaattcggttacgagtagttgaaacaattaaccccaaaaaaagttgagctaaatacctcggttacactaaaattactgacaaaaatgtacaatttaaataacaacattgtaagcaagaccctaatctaa

SEQ ID NO: 3161 - DNA, 200 bp, Conyza canadensis
cctatagtatgaacatatttccttggagttatcccagagagatattcgagatacctaggcacatacgggtcaataagttatttagggaaaatgattacagtatttggaggaatacccgttgcaccgaaactcttccaacatgtgccagtacatttgtaaagttactgcaacttagtaaactctatgggtaatacaaccat

SEQ ID NO: 3162 - DNA, 200 bp, Conyza canadensis
atggttgtattacccatagagtttactaagttgcagtaactttacaaatgtactggcacatgttggaagagtttcggtgcaacgggtattcctccaaatactgtaatcattttccctaaataacttattgacccgtatgtgcctaggtatctcgaatatctctctgggataactccaaggaaatatgttcatactatagg

SEQ ID NO: 3163 - DNA, 200 bp, Conyza canadensis
taaactctatgggtaatacaaccatgtgtttacaggtaggagtatctttttgataaaatttatttggtttatgtattgaccagggtgaagcgccacactatctcggtgttcgtaggagatgaaagtggtattataaaccgaatcgcaggagttttcgctagaagaggttataatatcgagtcacttgctgttggtttaaa

SEQ ID NO: 3164 - DNA, 200 bp, Conyza canadensis
tttaaaccaacagcaagtgactcgatattataacctcttctagcgaaaactcctgcgattcggtttataataccactttcatctcctacgaacaccgagatagtgtggcgcttcaccctggtcaatacataaaccaaataaattttatcaaaaagatactcctacctgtaaacacatggttgtattacccatagagttta

SEQ ID NO: 3165 - DNA, 200 bp, Conyza canadensis
tcgagtcacttgctgttggtttaaacaaggacaaggctttgtttactatagttgtttctggaactgaaaaggtcttgcaacaagtggtggagcagctcaacaagcttgtgaacgtcataaaggtttgtatgaccatcaaatgtgaatcttgggtgctctttgaactttatacatgattaacgtgtttgatgtatcaggtg

SEQ ID NO: 3166 - DNA, 200 bp, Conyza canadensis
cacctgatacatcaaacacgttaatcatgtataaagttcaaagagcacccaagattcacatttgatggtcatacaaacctttatgacgttcacaagcttgttgagctgctccaccacttgttgcaagaccttttcagttccagaaacaactatagtaaacaaagccttgtccttgtttaaaccaacagcaagtgactcga

SEQ ID NO: 3167 - DNA, 200 bp, Conyza canadensis
attaacgtgtttgatgtatcaggtggaagacctttccaaggaaccacaggtagaacgggaattgatgcttgtgaagcttaatgtagatccaaccacacgagctgaggttttagtgttttgcatacttctatgatattcaattatagaaaatggcagagagaatattttatttgagtctgatacagggttacttttaccct

SEQ ID NO: 3168 - DNA, 200 bp, Conyza canadensis
agggtaaaagtaaccctgtatcagactcaaataaaatattctctctgccattttctataattgaatatcatagaagtatgcaaaacactaaaacctcagctcgtgtggttggatctacattaagcttcacaagcatcaattcccgttctacctgtggttccttggaaaggtcttccacctgatacatcaaacacgttaat

SEQ ID NO: 3169 - DNA, 200 bp, Conyza canadensis
tctgatacagggttacttttaccctttagattatgtggctagtagacgtctttagagccaacgttgtggatgcatcagaaagctcgttgactatagaggtacgtagcttcttattcattcaatctgaacagttgcatactcccacagtctcactgttttgttattagaacatgcgtcaacaaaaaaaaaagtttgtaatt

SEQ ID NO: 3170 - DNA, 200 bp, Conyza canadensis
aattacaaacttttttttttgttgacgcatgttctaataacaaaacagtgagactgtgggagtatgcaactgttcagattgaatgaataagaagctacgtacctctatagtcaacgagctttctgatgcatccacaacgttggctctaaagacgtctactagccacataatctaaagggtaaaagtaaccctgtatcaga

SEQ ID NO: 3171 - DNA, 200 bp, Conyza canadensis
tcaacaaaaaaaaaagtttgtaattttgataatattgctagtaattatgtaatgctaattttatcatctggtcaatttaggttaccggggatcctgggaagattgttgctgttcagagaaatttagccaagttcggaatccaagagctcactagaacaggaaaggtatgcaagcacaagcataagttttctaaatttctg

SEQ ID NO: 3172 - DNA, 200 bp, Conyza canadensis
cagaaatttagaaaacttatgcttgtgcttgcatacctttcctgttctagtgagctcttggattccgaacttggctaaatttctctgaacagcaacaatcttcccaggatccccggtaacctaaattgaccagatgataaaattagcattacataattactagcaatattatcaaaattacaaacttttttttttgttga

SEQ ID NO: 3173 - DNA, 200 bp, Conyza canadensis
caagcataagttttctaaatttctgttatgtgttgcatatatttcatagaaatttaaattttctaccagaatgatagttggtcgcaaagaccataaatgtccattgaatctcctgactgaatttgttgtaacttttagatcgccctaagacgggaaaaactgggtgaaactgctccattttggaacttctctgcagcatc

SEQ ID NO: 3174 - DNA, 200 bp, Conyza canadensis
gatgctgcagagaagttccaaaatggagcagtttcacccagtttttcccgtcttagggcgatctaaaagttacaacaaattcagtcaggagattcaatggacatttatggtctttgcgaccaactatcattctggtagaaaatttaaatttctatgaaatatatgcaacacataacagaaatttagaaaacttatgcttg

SEQ ID NO: 3175 - DNA, 200 bp, Conyza canadensis
cattttggaacttctctgcagcatcttacccagatctagaatccgcaactccaattgctacttcttcaagtgttacttgcactgttgatgaggattcgactgcaatgtcaggggtaagctgtctaatctttaaaggctttccttgcaatgttttgctccctaattgcatatcaccaccttataactctattctgtttagc

SEQ ID NO: 3176 - DNA, 200 bp, Conyza canadensis
gctaaacagaatagagttataaggtggtgatatgcaattagggagcaaaacattgcaaggaaagcctttaaagattagacagcttacccctgacattgcagtcgaatcctcatcaacagtgcaagtaacacttgaagaagtagcaattggagttgcggattctagatctgggtaagatgctgcagagaagttccaaaatg

SEQ ID NO: 3177 - DNA, 200 bp, Conyza canadensis
accttataactctattctgtttagcatttaggaattgtgacagagatagaaaggcaatgtataaaatatcaatgatacaattgaatgataaaatgataaagacttttactttgatttctgcaagacacaatatatgtaagttactaaatctgcagtttcacacaacaattaattctttagttggcacactttcactgtgt

SEQ ID NO: 3178 - DNA, 200 bp, Conyza canadensis
acacagtgaaagtgtgccaactaaagaattaattgttgtgtgaaactgcagatttagtaacttacatatattgtgtcttgcagaaatcaaagtaaaagtctttatcattttatcattcaattgtatcattgatattttatacattgcctttctatctctgtcacaattcctaaatgctaaacagaatagagttataaggt

SEQ ID NO: 3179 - DNA, 200 bp, Conyza canadensis
tttagttggcacactttcactgtgtctggtactgcttagaccaaatttctacttatttaacactttaatctgttaagtggttaacaagatttgaacaacctagttgttaaattgatttttgatttcatttgagttattaataatcttgtttgaatgaagggtgatgtgtatcctgtggagtacaacaatagctgcataat

SEQ ID NO: 3180 - DNA, 200 bp, Conyza canadensis
attatgcagctattgttgtactccacaggatacacatcacccttcattcaaacaagattattaataactcaaatgaaatcaaaaatcaatttaacaactaggttgttcaaatcttgttaaccacttaacagattaaagtgttaaataagtagaaatttggtctaagcagtaccagacacagtgaaagtgtgccaactaaa

SEQ ID NO: 3181 - DNA, 200 bp, Conyza canadensis
tggagtacaacaatagctgcataatggatcaagttcttgacgccaattggggggtagtctatgatgaagatgtaagatatcaatttatcatctttcatttgttccttatcgctatatttatacttgatccctttattgatgaaagacaattatatcttagatggatcataacttatatgtttcgccaaacacacttctag

SEQ ID NO: 3182 - DNA, 200 bp, Conyza canadensis
ctagaagtgtgtttggcgaaacatataagttatgatccatctaagatataattgtctttcatcaataaagggatcaagtataaatatagcgataaggaacaaatgaaagatgataaattgatatcttacatcttcatcatagactaccccccaattggcgtcaagaacttgatccattatgcagctattgttgtactcca

SEQ ID NO: 3183 - DNA, 200 bp, Conyza canadensis
tatgtttcgccaaacacacttctagtttctaagatagcgaacagttcagcttaattagttaatattcttcaagctaaagatgtatgttgttattctcattctaacacccacaggttgttactatttagaaaaggggaaatagttatggcatataatcgtgtttactgaggcttgtgactactcatagatttcacttttga

SEQ ID NO: 3184 - DNA, 200 bp, Conyza canadensis
tcaaaagtgaaatctatgagtagtcacaagcctcagtaaacacgattatatgccataactatttccccttttctaaatagtaacaacctgtgggtgttagaatgagaataacaacatacatctttagcttgaagaatattaactaattaagctgaactgttcgctatcttagaaactagaagtgtgtttggcgaaacata

SEQ ID NO: 3185 - DNA, 200 bp, Conyza canadensis
gactactcatagatttcacttttgacacccaaattaatgttgcagtcaactggtcggcagtctcatactttaaacattctggtcaatgatactcctggagttctcaacgtggtcagtggagttatatccagaaggggttacaacattcaggttcttcttcttttttgctaattctgaagatacaattgttttaaagtaag

SEQ ID NO: 3186 - DNA, 200 bp, Conyza canadensis
cttactttaaaacaattgtatcttcagaattagcaaaaaagaagaagaacctgaatgttgtaaccccttctggatataactccactgaccacgttgagaactccaggagtatcattgaccagaatgtttaaagtatgagactgccgaccagttgactgcaacattaatttgggtgtcaaaagtgaaatctatgagtagtc

SEQ ID NO: 3187 - DNA, 200 bp, Conyza canadensis
gaagatacaattgttttaaagtaagatgtagtttgcaaataatactaataatcgtctttggaactggtgtcaacagagtctggccgtaggtccagcagaaatggagggtttatctcgcattacgactgtgattgctggtacagatgaatctatttacaagttggttcagcagttccgcaaattggtggatgttcatgagg

SEQ ID NO: 3188 - DNA, 200 bp, Conyza canadensis
cctcatgaacatccaccaatttgcggaactgctgaaccaacttgtaaatagattcatctgtaccagcaatcacagtcgtaatgcgagataaaccctccatttctgctggacctacggccagactctgttgacaccagttccaaagacgattattagtattatttgcaaactacatcttactttaaaacaattgtatcttc

SEQ ID NO: 3189 - DNA, 200 bp, Conyza canadensis
cgcaaattggtggatgttcatgaggtgagatttatttctttaaagttaaacctcttgaaattctcataaaatcgaccactataattttcgctgtatcttacttcaggcatggaaaacttataacttaatgaaagaaaatattgtttatatttaggtcaaagatatcacccatctaccatttgcagaacgtgagctaatgt

SEQ ID NO: 3190 - DNA, 200 bp, Conyza canadensis
acattagctcacgttctgcaaatggtagatgggtgatatctttgacctaaatataaacaatattttctttcattaagttataagttttccatgcctgaagtaagatacagcgaaaattatagtggtcgattttatgagaatttcaagaggtttaactttaaagaaataaatctcacctcatgaacatccaccaatttgcg

SEQ ID NO: 3191 - DNA, 200 bp, Conyza canadensis
ccatttgcagaacgtgagctaatgttaattaaagttgctgctagctctgctgttcgaagggatgtcctagacatcgccaccatctttcgagccaagcctgttgatgtttctgatcacactctcacactagaagtaaattttctacgtattgattttgaggtgtttctatgtcaaatattcttgtttctgatatcttctgt

SEQ ID NO: 3192 - DNA, 200 bp, Conyza canadensis
acagaagatatcagaaacaagaatatttgacatagaaacacctcaaaatcaatacgtagaaaatttacttctagtgtgagagtgtgatcagaaacatcaacaggcttggctcgaaagatggtggcgatgtctaggacatcccttcgaacagcagagctagcagcaactttaattaacattagctcacgttctgcaaatgg

SEQ ID NO: 3193 - DNA, 200 bp, Conyza canadensis
tattcttgtttctgatatcttctgttattcatatttcagctcacaggagacttcaacaagttgtttgcattgcaaagattgttagagtcctatggaatttgtgaggtttgttcaaacttttgacctcgaactccaatactgggtttcacttttcaatcttctgcacaactttattatggcctgctcctatctggttaggg

SEQ ID NO: 3194 - DNA, 200 bp, Conyza canadensis
ccctaaccagataggagcaggccataataaagttgtgcagaagattgaaaagtgaaacccagtattggagttcgaggtcaaaagtttgaacaaacctcacaaattccataggactctaacaatctttgcaatgcaaacaacttgttgaagtctcctgtgagctgaaatatgaataacagaagatatcagaaacaagaata

SEQ ID NO: 3195 - DNA, 200 bp, Conyza canadensis
atggcctgctcctatctggttagggacttggggttctccccagcaattcattctctcaaacccctagtctcgacattgtatcatgcctcactctgatatatcttctattttggagctgtattactatccaaattgtgtttattacacgaaatattattactagtaaaaacaatagtcattaaggtataactgtgcatggt

SEQ ID NO: 3196 - DNA, 200 bp, Conyza canadensis
accatgcacagttataccttaatgactattgtttttactagtaataatatttcgtgtaataaacacaatttggatagtaatacagctccaaaatagaagatatatcagagtgaggcatgatacaatgtcgagactaggggtttgagagaatgaattgctggggagaaccccaagtccctaaccagataggagcaggccat

SEQ ID NO: 3197 - DNA, 200 bp, Conyza canadensis
tcattaaggtataactgtgcatggtctttgatgctgttttctctgcattgcatcatttccctaatggtgcctaattgcattttaatatgcaggtcgcaaggactggtcgagtggcattggtgcgagagtcaggggtcgattctacatatctacgtgggtactcccttccgttataataacaccggaagttatccctcaat

SEQ ID NO: 3198 - DNA, 200 bp, Conyza canadensis
attgagggataacttccggtgttattataacggaagggagtacccacgtagatatgtagaatcgacccctgactctcgcaccaatgccactcgaccagtccttgcgacctgcatattaaaatgcaattaggcaccattagggaaatgatgcaatgcagagaaaacagcatcaaagaccatgcacagttataccttaatga

SEQ ID NO: 3199 - DNA, 200 bp, Conyza canadensis
ataacaccggaagttatccctcaattgtatgttgcattattgtagctgcaagtgaacacaactgttcagtgtcttttgcactgatggctgcggatgtgagagtatgacttcttgctagaaaaagaaaaaaggaatgtttagtagatcaatttatgttgtattatggtatgccgtgtgatgtcaaaactgtaacagctttc

SEQ ID NO: 3200 - DNA, 200 bp, Conyza canadensis
gaaagctgttacagttttgacatcacacggcataccataatacaacataaattgatctactaaacattccttttttctttttctagcaagaagtcatactctcacatccgcagccatcagtgcaaaagacactgaacagttgtgttcacttgcagctacaataatgcaacatacaattgagggataacttccggtgttat

SEQ ID NO: 3201 - DNA, 200 bp, Conyza canadensis
tgatgtcaaaactgtaacagctttcattcatagaagtttcatacttaaaatgtgatgttaagcaaatttataagtaataatgtttgtacttctatacttctatataaaagttataatcccatattgaaagttaaaaaaaataagacatacaaattgactaaattacttttaatgaattaaaatcaccaccctttaatatt

SEQ ID NO: 3202 - DNA, 200 bp, Conyza canadensis
aatattaaagggtggtgattttaattcattaaaagtaatttagtcaatttgtatgtcttattttttttaactttcaatatgggattataacttttatatagaagtatagaagtacaaacattattacttataaatttgcttaacatcacattttaagtatgaaacttctatgaatgaaagctgttacagttttgacatca

SEQ ID NO: 3203 - DNA, 200 bp, Conyza canadensis
attaaaatcaccaccctttaatattaaattacaccatcagctccttatattataaaagatttatattaccttctttaaatcaaacacgtttacatcaattacctacaccatttgacgtcgtgaacaccatcaccatccgtcgccgccatcatactaccacattgcgcgataatgtgctagttatatacctagagattatt

SEQ ID NO: 3204 - DNA, 200 bp, Conyza canadensis
aataatctctaggtatataactagcacattatcgcgcaatgtggtagtatgatggcggcgacggatggtgatggtgttcacgacgtcaaatggtgtaggtaattgatgtaaacgtgtttgatttaaagaaggtaatataaatcttttataatataaggagctgatggtgtaatttaatattaaagggtggtgattttaat

SEQ ID NO: 3205 - DNA, 200 bp, Conyza canadensis
gctagttatatacctagagattattggtggaattggttgaaatatacgagtctttattttgtcaacgttatacactcgaggggtagaactgaacaaattatgtatgtacttggtggaacggtgggacaaaatgaggagaaaagctatataatacttgtccctgacttcttgagccattttaatgaagcaaatgtcctcca

SEQ ID NO: 3206 - DNA, 200 bp, Conyza canadensis
tggaggacatttgcttcattaaaatggctcaagaagtcagggacaagtattatatagcttttctcctcattttgtcccaccgttccaccaagtacatacataatttgttcagttctacccctcgagtgtataacgttgacaaaataaagactcgtatatttcaaccaattccaccaataatctctaggtatataactagc

SEQ ID NO: 3207 - DNA, 200 bp, Conyza canadensis
attttaatgaagcaaatgtcctccaaaaaaccttttttcttcgggtcgagcgttagcatcattataacattttagactaatttctaagcattccattatgatcctcagtataccagactttatacagctttgagaaataaaacacttgatatttcttgcacaaatatttgccattatgatctcagtataccagactttat

SEQ ID NO: 3208 - DNA, 200 bp, Conyza canadensis
ataaagtctggtatactgagatcataatggcaaatatttgtgcaagaaatatcaagtgttttatttctcaaagctgtataaagtctggtatactgaggatcataatggaatgcttagaaattagtctaaaatgttataatgatgctaacgctcgacccgaagaaaaaaggttttttggaggacatttgcttcattaaaat

SEQ ID NO: 3209 - DNA, 200 bp, Conyza canadensis
atgatctcagtataccagactttataaagattatatatacaaaacccaagtaacccaagacttaacaacattcgacttctaaccttaataagtaatacatcacatacccatccccatcccatccacccaaaagccgagaaaaaaaaaaagttatgaacacataattaacacttatactcgaggcaaaaaaaactctcaat

SEQ ID NO: 3210 - DNA, 200 bp, Conyza canadensis
attgagagttttttttgcctcgagtataagtgttaattatgtgttcataactttttttttttctcggcttttgggtggatgggatggggatgggtatgtgatgtattacttattaaggttagaagtcgaatgttgttaagtcttgggttacttgggttttgtatatataatctttataaagtctggtatactgagatcat

SEQ ID NO: 3211 - DNA, 200 bp, Conyza canadensis
actcgaggcaaaaaaaactctcaataaccatgccctcttctggagacctggacaacgtataagaatcattctcttgtcaaaatgaatatatatcgagatcaggaagatgatcacctcatcttgtgaataactaagccagataactcttaaggagtatgcagatcgcgtaaatggtcaacaacatcacgtgaaccagtcaa

SEQ ID NO: 3212 - DNA, 200 bp, Conyza canadensis
ttgactggttcacgtgatgttgttgaccatttacgcgatctgcatactccttaagagttatctggcttagttattcacaagatgaggtgatcatcttcctgatctcgatatatattcattttgacaagagaatgattcttatacgttgtccaggtctccagaagagggcatggttattgagagttttttttgcctcgagt

SEQ ID NO: 3213 - DNA, 200 bp, Conyza canadensis
caacaacatcacgtgaaccagtcaaccacttgatatcagaacggtgaagtacatttgcatggacacgggctgaattatcaggtttctgctccataggcattgacctctctgaaaagctgtgggtatggcgcacacgaactctgtgacattttgtttctgttgtacagctgcccctcacttcaaccatcaacataacttcc

SEQ ID NO: 3214 - DNA, 200 bp, Conyza canadensis
ggaagttatgttgatggttgaagtgaggggcagctgtacaacagaaacaaaatgtcacagagttcgtgtgcgccatacccacagcttttcagagaggtcaatgcctatggagcagaaacctgataattcagcccgtgtccatgcaaatgtacttcaccgttctgatatcaagtggttgactggttcacgtgatgttgttg

SEQ ID NO: 3215 - DNA, 200 bp, Conyza canadensis
cacttcaaccatcaacataacttccttatcacgaacgtcttcgcaccagcagttttgcggagcaccatctacatattcctctagggtttcatatccttggtgatgaactgatatctctacaatatgatttggctctattatacccactgttggcttgacctggttcaaagcaatagacaattgttagctaccttcaccgt

SEQ ID NO: 3216 - DNA, 200 bp, Conyza canadensis
acggtgaaggtagctaacaattgtctattgctttgaaccaggtcaagccaacagtgggtataatagagccaaatcatattgtagagatatcagttcatcaccaaggatatgaaaccctagaggaatatgtagatggtgctccgcaaaactgctggtgcgaagacgttcgtgataaggaagttatgttgatggttgaagtg

SEQ ID NO: 3217 - DNA, 200 bp, Conyza canadensis
gacaattgttagctaccttcaccgtgagtgcatcacaacaaattttttagtccaatgttcaatgcatgtgataaattcacctcaagccatcgtggaaagccataagaacctcttggacggtgactggaagcctgttttccatctttaatagtacactggccttcacatataactttaaacagagcttcatcttccccgca

SEQ ID NO: 3218 - DNA, 200 bp, Conyza canadensis
tgcggggaagatgaagctctgtttaaagttatatgtgaaggccagtgtactattaaagatggaaaacaggcttccagtcaccgtccaagaggttcttatggctttccacgatggcttgaggtgaatttatcacatgcattgaacattggactaaaaaatttgttgtgatgcactcacggtgaaggtagctaacaattgtc

SEQ ID NO: 3219 - DNA, 200 bp, Conyza canadensis
taaacagagcttcatcttccccgcatttattggtaatcctcaagactgatgaatccctgtcatgaagaattatattgttcgtactgggaatagcttctggaacattgcactgttcttcaagaatactcctaatttttttattagatttgataacttctccaaatatttttcttcttcttgactcatctactcgagccagt

SEQ ID NO: 3220 - DNA, 200 bp, Conyza canadensis
actggctcgagtagatgagtcaagaagaagaaaaatatttggagaagttatcaaatctaataaaaaaattaggagtattcttgaagaacagtgcaatgttccagaagctattcccagtacgaacaatataattcttcatgacagggattcatcagtcttgaggattaccaataaatgcggggaagatgaagctctgttta

SEQ ID NO: 3221 - DNA, 200 bp, Conyza canadensis
ttccatatttggcatgatttggattttgaaaggataagttataaatttatcaatatatccttcaaacttttatatgaactataataactatggggctataaatgtaatattatgtatttttatcctttcttattcttctcttttaactcaagaatgcctttaaatccttttattcactttcttttcttttaaatgataaa

SEQ ID NO: 3222 - DNA, 200 bp, Conyza canadensis
tttatcatttaaaagaaaagaaagtgaataaaaggatttaaaggcattcttgagttaaaagagaagaataagaaaggataaaaatacataatattacatttatagccccatagttattatagttcatataaaagtttgaaggatatattgataaatttataacttatcctttcaaaatccaaatcatgccaaatatggaa

SEQ ID NO: 3223 - DNA, 200 bp, Conyza canadensis
actttcttttcttttaaatgataaaactcaagaatgcaatttataaatataattttatatcctttcttctcctattcaatcttctcttttattctcctttaataaaactcgaaaatacagtgttagggtattgccaaaagtcaaaccggcagagtgcatatatattggaggtgttagccatttttatttataaaaaaaaa

SEQ ID NO: 3224 - DNA, 200 bp, Conyza canadensis
tttttttttataaataaaaatggctaacacctccaatatatatgcactctgccggtttgacttttggcaataccctaacactgtattttcgagttttattaaaggagaataaaagagaagattgaataggagaagaaaggatataaaattatatttataaattgcattcttgagttttatcatttaaaagaaaagaaagt

SEQ ID NO: 3225 - DNA, 200 bp, Conyza canadensis
agccatttttatttataaaaaaaaaaaaaatctgtacgggcgtgagtgcatatatatatatattgcggtttggaaaaaaaaaaagaaaaacctttaaacaaaaaaatatgattgagcacgttgacataaaaatgtaatgtgtaccgaccacggtcaatatgtccttaccacccgccgcctccacctttaagagagagaga

SEQ ID NO: 3226 - DNA, 200 bp, Conyza canadensis
tctctctctcttaaaggtggaggcggcgggtggtaaggacatattgaccgtggtcggtacacattacatttttatgtcaacgtgctcaatcatatttttttgtttaaaggtttttctttttttttttccaaaccgcaatatatatatatatgcactcacgcccgtacagattttttttttttttataaataaaaatggct

SEQ ID NO: 3227 - DNA, 200 bp, Conyza canadensis
cgcctccacctttaagagagagagagagagagagagagaatcattatcaacatcatataataacaccggaaaagcaaagcaacaaaaatgagtgtcacagccacattgcagtctgtctctactccggcgtcaccactaagccagggctgcagattggaactaccacctaaactgctttctttcactaaatcaagtgttgg

SEQ ID NO: 3228 - DNA, 200 bp, Conyza canadensis
ccaacacttgatttagtgaaagaaagcagtttaggtggtagttccaatctgcagccctggcttagtggtgacgccggagtagagacagactgcaatgtggctgtgacactcatttttgttgctttgcttttccggtgttattatatgatgttgataatgattctctctctctctctctctctctcttaaaggtggaggcg

SEQ ID NO: 3229 - DNA, 200 bp, Conyza canadensis
tttctttcactaaatcaagtgttggtcgaaggcttgcttttaagctggttaatgctatctccgactccggtaatggagctccggcttcacttctttctacttcttcccttaatggagttactgccccgccactttcttccaagtataactcttctcttttctttaattccttcttaaattactagtaactataataatat

SEQ ID NO: 3230 - DNA, 200 bp, Conyza canadensis
atattattatagttactagtaatttaagaaggaattaaagaaaagagaagagttatacttggaagaaagtggcggggcagtaactccattaagggaagaagtagaaagaagtgaagccggagctccattaccggagtcggagatagcattaaccagcttaaaagcaagccttcgaccaacacttgatttagtgaaagaaa

SEQ ID NO: 3231 - DNA, 200 bp, Conyza canadensis
aaattactagtaactataataatatttgtttttatagaacctttcatgtttttctttacccaagcagcttataattaataactttttgcaaaagcttaattaaaaagcatttgtcatataatagctagaaggaaggcaggattagctttcaagcagtcttcaagcatgacatgaattcaagacagtctgcttctgagaat

SEQ ID NO: 3232 - DNA, 200 bp, Conyza canadensis
attctcagaagcagactgtcttgaattcatgtcatgcttgaagactgcttgaaagctaatcctgccttccttctagctattatatgacaaatgctttttaattaagcttttgcaaaaagttattaattataagctgcttgggtaaagaaaaacatgaaaggttctataaaaacaaatattattatagttactagtaattt

SEQ ID NO: 3233 - DNA, 200 bp, Conyza canadensis
ttcaagacagtctgcttctgagaatctgattctactttcatgccacctttcacttccccgtggcaatgcctttgattctggctttagattagggtcttgcttacaatgttgttatttaaattgtacatttttgtcagtaattttagtgtaaccgaggtatttagctcaactttttttggggttaattgtttcaactactc

SEQ ID NO: 3234 - DNA, 200 bp, Conyza canadensis
gagtagttgaaacaattaaccccaaaaaaagttgagctaaatacctcggttacactaaaattactgacaaaaatgtacaatttaaataacaacattgtaagcaagaccctaatctaaagccagaatcaaaggcattgccacggggaagtgaaaggtggcatgaaagtagaatcagattctcagaagcagactgtcttgaa

SEQ ID NO: 3235 - DNA, 200 bp, Conyza canadensis
ttggggttaattgtttcaactactcgtaaccgaattttgattgttgtttaagattctcttgcaacaaagttctcaactttaagcctatagtatgaacatatttccttggagttatcccagagagatattcgagatacctaggcacatacgggtcaataagttatttagggaaaatgattacagtatttggaggaataccc

SEQ ID NO: 3236 - DNA, 200 bp, Conyza canadensis
gggtattcctccaaatactgtaatcattttccctaaataacttattgacccgtatgtgcctaggtatctcgaatatctctctgggataactccaaggaaatatgttcatactataggcttaaagttgagaactttgttgcaagagaatcttaaacaacaatcaaaattcggttacgagtagttgaaacaattaaccccaa

SEQ ID NO: 3237 - DNA, 200 bp, Conyza canadensis
gattacagtatttggaggaatacccgttgcaccgaaactcttccaacatgtgccagtacatttgtaaagttactgcaacttagtaaactctatgggtaatacaaccatgtgtttacaggtaggagtatctttttgataaaatttatttggtttatgtattgaccagggtgaagcgccacactatctcggtgttcgtagga

SEQ ID NO: 3238 - DNA, 200 bp, Conyza canadensis
tcctacgaacaccgagatagtgtggcgcttcaccctggtcaatacataaaccaaataaattttatcaaaaagatactcctacctgtaaacacatggttgtattacccatagagtttactaagttgcagtaactttacaaatgtactggcacatgttggaagagtttcggtgcaacgggtattcctccaaatactgtaatc

SEQ ID NO: 3239 - DNA, 200 bp, Conyza canadensis
ccacactatctcggtgttcgtaggagatgaaagtggtattataaaccgaatcgcaggagttttcgctagaagaggttataatatcgagtcacttgctgttggtttaaacaaggacaaggctttgtttactatagttgtttctggaactgaaaaggtcttgcaacaagtggtggagcagctcaacaagcttgtgaacgtca

SEQ ID NO: 3240 - DNA, 200 bp, Conyza canadensis
tgacgttcacaagcttgttgagctgctccaccacttgttgcaagaccttttcagttccagaaacaactatagtaaacaaagccttgtccttgtttaaaccaacagcaagtgactcgatattataacctcttctagcgaaaactcctgcgattcggtttataataccactttcatctcctacgaacaccgagatagtgtgg

SEQ ID NO: 3241 - DNA, 200 bp, Conyza canadensis
cagctcaacaagcttgtgaacgtcataaaggtttgtatgaccatcaaatgtgaatcttgggtgctctttgaactttatacatgattaacgagtttgatgtatcaggtggaagacctttccaaggaaccacaggtagaacgggaattgatgcttgtgaagcttaatgtagatccaaccacacgagctgaggttttagtgtt

SEQ ID NO: 3242 - DNA, 200 bp, Conyza canadensis
aacactaaaacctcagctcgtgtggttggatctacattaagcttcacaagcatcaattcccgttctacctgtggttccttggaaaggtcttccacctgatacatcaaactcgttaatcatgtataaagttcaaagagcacccaagattcacatttgatggtcatacaaacctttatgacgttcacaagcttgttgagctg

SEQ ID NO: 3243 - DNA, 200 bp, Conyza canadensis
ccacacgagctgaggttttagtgttttgcatacttctatgatattcaattatagaaaatggcagagagaatattttatttgagtctgatacagggttacttttaccctttagattatgtggctagtagacgtctttagagccaacgttgtggatgcatcagaaagctcgttgactatagaggtacgtagcttcttattca

SEQ ID NO: 3244 - DNA, 200 bp, Conyza canadensis
tgaataagaagctacgtacctctatagtcaacgagctttctgatgcatccacaacgttggctctaaagacgtctactagccacataatctaaagggtaaaagtaaccctgtatcagactcaaataaaatattctctctgccattttctataattgaatatcatagaagtatgcaaaacactaaaacctcagctcgtgtgg

SEQ ID NO: 3245 - DNA, 200 bp, Conyza canadensis
atagaggtacgtagcttcttattcattcaatctgaacagttgcatactcccacagtctcactgttttgttattagaacatgcgtcaacaaaaaaaaaagtttgtaattttgataatattgctagtaattatgtaatgctaattttatcatctggtcaatttaggttaccggggatcctgggaagattgttgctgttcaga

SEQ ID NO: 3246 - DNA, 200 bp, Conyza canadensis
tctgaacagcaacaatcttcccaggatccccggtaacctaaattgaccagatgataaaattagcattacataattactagcaatattatcaaaattacaaacttttttttttgttgacgcatgttctaataacaaaacagtgagactgtgggagtatgcaactgttcagattgaatgaataagaagctacgtacctctat

SEQ ID NO: 3247 - DNA, 200 bp, Conyza canadensis
cctgggaagattgttgctgttcagagaaatttagccaagttcggaatccaagagctcactagaacaggaaaggtatgcaagcacaagcataagttttctaaatttctgttatgtgttgcatatatttcatagaaatttaaattttctaccagaatgatagttggtcgcaaagaccataaatgtccattgaatctcctgac

SEQ ID NO: 3248 - DNA, 200 bp, Conyza canadensis
gtcaggagattcaatggacatttatggtctttgcgaccaactatcattctggtagaaaatttaaatttctatgaaatatatgcaacacataacagaaatttagaaaacttatgcttgtgcttgcatacctttcctgttctagtgagctcttggattccgaacttggctaaatttctctgaacagcaacaatcttcccagg

SEQ ID NO: 3249 - DNA, 200 bp, Conyza canadensis
ataaatgtccattgaatctcctgactgaatttgttgtaacttttagatcgctctaagacgggaaaaactgggtgaaactgctccattttggaacttctctgcagcatcttacccagatctagaatccgcaactccaattgctacttcttcaagtgttacttgcactgttgatgaggattcgactgcaatgtcaggggtaa

SEQ ID NO: 3250 - DNA, 200 bp, Conyza canadensis
ttacccctgacattgcagtcgaatcctcatcaacagtgcaagtaacacttgaagaagtagcaattggagttgcggattctagatctgggtaagatgctgcagagaagttccaaaatggagcagtttcacccagtttttcccgtcttagagcgatctaaaagttacaacaaattcagtcaggagattcaatggacatttat

SEQ ID NO: 3251 - DNA, 200 bp, Conyza canadensis
gattcgactgcaatgtcaggggtaacctgtctaatctttaaaggctttccttgcaatgttttgctccctaattgcatatcaccaccttataactctattctgtttagcatttaggaattgtgacagagatagaaaggcaatgtataaaatatcaatgatacaattgaatgataaaatgataaagacttttactttgattt

SEQ ID NO: 3252 - DNA, 200 bp, Conyza canadensis
aaatcaaagtaaaagtctttatcattttatcattcaattgtatcattgatattttatacattgcctttctatctctgtcacaattcctaaatgctaaacagaatagagttataaggtggtgatatgcaattagggagcaaaacattgcaaggaaagcctttaaagattagacaggttacccctgacattgcagtcgaatc

SEQ ID NO: 3253 - DNA, 200 bp, Conyza canadensis
atgataaagacttttactttgatttctgcaagacacaatatatgtaagttactaaatctgcagtttcacacaacaattaattctttagttggcacactttcactgtgtctggtactgcttagaccaaatttctacttatttaacactttaatctgttaagtggttaacaagatttgaacaacctagttgttaaattgatt

SEQ ID NO: 3254 - DNA, 200 bp, Conyza canadensis
aatcaatttaacaactaggttgttcaaatcttgttaaccacttaacagattaaagtgttaaataagtagaaatttggtctaagcagtaccagacacagtgaaagtgtgccaactaaagaattaattgttgtgtgaaactgcagatttagtaacttacatatattgtgtcttgcagaaatcaaagtaaaagtctttatcat

SEQ ID NO: 3255 - DNA, 200 bp, Conyza canadensis
gaacaacctagttgttaaattgatttttgatttcatttgagttattaataatcttgtttgaatgaagggtgatgtgtatcctgtggagtacaacaatagctgcataatggatcaagttcttgacgccaattggggggtagtctatgatgaagatgtaagatatcaatttatcatctttcatttgttccttatcgctatat

SEQ ID NO: 3256 - DNA, 200 bp, Conyza canadensis
atatagcgataaggaacaaatgaaagatgataaattgatatcttacatcttcatcatagactaccccccaattggcgtcaagaacttgatccattatgcagctattgttgtactccacaggatacacatcacccttcattcaaacaagattattaataactcaaatgaaatcaaaaatcaatttaacaactaggttgttc

SEQ ID NO: 3257 - DNA, 200 bp, Conyza canadensis
tttcatttgttccttatcgctatatttatacttgatccctttattgatgaaagacaattatatcttagatggatcataacttatatgtttcgccaaacacacttctagtttctaagatagcgaacagttcagcttaattagttaatattcttcaagctaaagatgtatgttgttattctcattctaacacccacaggttg

SEQ ID NO: 3258 - DNA, 200 bp, Conyza canadensis
caacctgtgggtgttagaatgagaataacaacatacatctttagcttgaagaatattaactaattaagctgaactgttcgctatcttagaaactagaagtgtgtttggcgaaacatataagttatgatccatctaagatataattgtctttcatcaataaagggatcaagtataaatatagcgataaggaacaaatgaaa

SEQ ID NO: 3259 - DNA, 200 bp, Conyza canadensis
ttctcattctaacacccacaggttgttactatttagaaaaggggaaatagttatggcatataatcgtgtttactgaggcttgtgactactcatagatttcacttttgacacccaaattaatgttgcagtcaactggtcggcagtctcatactttaaacattctggtcaatgatactcctggagttctcaacgtggtcagt

SEQ ID NO: 3260 - DNA, 200 bp, Conyza canadensis
actgaccacgttgagaactccaggagtatcattgaccagaatgtttaaagtatgagactgccgaccagttgactgcaacattaatttgggtgtcaaaagtgaaatctatgagtagtcacaagcctcagtaaacacgattatatgccataactatttccccttttctaaatagtaacaacctgtgggtgttagaatgagaa

SEQ ID NO: 3261 - DNA, 200 bp, Conyza canadensis
tcctggagttctcaacgtggtcagtggagttatatccagaaggggttacaacattcaggttcttcttcttttttgctaattctgaagatacaattgttttaaagtaagatgtagtttgcaaataatactaataatcgtctttggaactggtgtcaacagagtctggccgtaggtccagcagaaatggagggtttatctcg

SEQ ID NO: 3262 - DNA, 200 bp, Conyza canadensis
cgagataaaccctccatttctgctggacctacggccagactctgttgacaccagttccaaagacgattattagtattatttgcaaactacatcttactttaaaacaattgtatcttcagaattagcaaaaaagaagaagaacctgaatgttgtaaccccttctggatataactccactgaccacgttgagaactccagga

SEQ ID NO: 3263 - DNA, 200 bp, Conyza canadensis
cagcagaaatggagggtttatctcgcattacgactgtgattgctggtacagatgaatctatttacaagttggttcagcagttccgcaaattggtggatgttcatgaggtgagatttatttctttaaagttaaacctcttgaaattctcataaaatcgaccactataattttcgctgtatcttacttcaggcatggaaaac

SEQ ID NO: 3264 - DNA, 200 bp, Conyza canadensis
gttttccatgcctgaagtaagatacagcgaaaattatagtggtcgattttatgagaatttcaagaggtttaactttaaagaaataaatctcacctcatgaacatccaccaatttgcggaactgctgaaccaacttgtaaatagattcatctgtaccagcaatcacagtcgtaatgcgagataaaccctccatttctgctg

SEQ ID NO: 3265 - DNA, 200 bp, Conyza canadensis
gtatcttacttcaggcatggaaaacttataacttaatgaaagaaaatattgtttatatttaggtcaaagatatcacccatctaccatttgcagaacgtgagctaatgttaattaaagttgctgctagctctgctgttcgaagggatgtcctagacatcgccaccatctttcgagccaagcctgttgatgtttctgatcac

SEQ ID NO: 3266 - DNA, 200 bp, Conyza canadensis
gtgatcagaaacatcaacaggcttggctcgaaagatggtggcgatgtctaggacatcccttcgaacagcagagctagcagcaactttaattaacattagctcacgttctgcaaatggtagatgggtgatatctttgacctaaatataaacaatattttctttcattaagttataagttttccatgcctgaagtaagatac

SEQ ID NO: 3267 - DNA, 200 bp, Conyza canadensis
caagcctgttgatgtttctgatcacactctcacactagaagtaaattttctacgtattgattttgaggtgtttctatgtcaaatattcttgtttctgatatcttctgttattcatatttcagctcacaggagacttcaacaagttgtttgcattgcaaagattgttagagtcctatggaatttgtgaggttcgttcaaac

SEQ ID NO: 3268 - DNA, 200 bp, Conyza canadensis
gtttgaacgaacctcacaaattccataggactctaacaatctttgcaatgcaaacaacttgttgaagtctcctgtgagctgaaatatgaataacagaagatatcagaaacaagaatatttgacatagaaacacctcaaaatcaatacgtagaaaatttacttctagtgtgagagtgtgatcagaaacatcaacaggcttg

SEQ ID NO: 3269 - DNA, 200 bp, Conyza canadensis
tggaatttgtgaggttcgttcaaacttttgacctcgaactccaatactgggtttcacttttcaatcttctgcacaactttattatggcctgctcctatctggttagggacttggggttctccccagcaattcattctctcaaacccctagtctcgacattgtatcatgcctcactctgatatatcttctattttggagct

SEQ ID NO: 3270 - DNA, 200 bp, Conyza canadensis
agctccaaaatagaagatatatcagagtgaggcatgatacaatgtcgagactaggggtttgagagaatgaattgctggggagaaccccaagtccctaaccagataggagcaggccataataaagttgtgcagaagattgaaaagtgaaacccagtattggagttcgaggtcaaaagtttgaacgaacctcacaaattcca

SEQ ID NO: 3271 - DNA, 200 bp, Conyza canadensis
ctgatatatcttctattttggagctgtattactatccaaattgtgtttattacacgaaatattattactagtaaaaacaatagtcattaaggtataactgtgcatggtctttgatgctgttttctctgcattgcatcatttccctaatggtgcctaattgcattttaatatgcaggtcgcaaggactggtcgagtggcat

SEQ ID NO: 3272 - DNA, 200 bp, Conyza canadensis
atgccactcgaccagtccttgcgacctgcatattaaaatgcaattaggcaccattagggaaatgatgcaatgcagagaaaacagcatcaaagaccatgcacagttataccttaatgactattgtttttactagtaataatatttcgtgtaataaacacaatttggatagtaatacagctccaaaatagaagatatatcag

SEQ ID NO: 3273 - DNA, 200 bp, Conyza canadensis
gtcgcaaggactggtcgagtggcattggtgcgagagtcaggggtcgattctacatatctacgtgggtactcccttccgttataataacaccggaagttatccctcaattgtatgttgcattattgtagctgcaagtgaacacaactgttcagtgtcttttgcactgatggctgcggatgtgagagtatgacttcttgcta

SEQ ID NO: 3274 - DNA, 200 bp, Conyza canadensis
tagcaagaagtcatactctcacatccgcagccatcagtgcaaaagacactgaacagttgtgttcacttgcagctacaataatgcaacatacaattgagggataacttccggtgttattataacggaagggagtacccacgtagatatgtagaatcgacccctgactctcgcaccaatgccactcgaccagtccttgcgac

SEQ ID NO: 3275 - DNA, 200 bp, Conyza canadensis
gatgtgagagtatgacttcttgctagaaaaagaaaaaaggaatgtttagtagatcaatttatgttgtattatggtatgccgtgtgatgtcaaaactgtaacagctttcattcatagaagtttcatacttaaaatgtgatgttaagcaaatttataagtaataatgtttgtacttctatacttctatataaaagttataat

SEQ ID NO: 3276 - DNA, 200 bp, Conyza canadensis
attataacttttatatagaagtatagaagtacaaacattattacttataaatttgcttaacatcacattttaagtatgaaacttctatgaatgaaagctgttacagttttgacatcacacggcataccataatacaacataaattgatctactaaacattccttttttctttttctagcaagaagtcatactctcacatc

SEQ ID NO: 3277 - DNA, 200 bp, Conyza canadensis
tatacttctatataaaagttataatcccatattgaaagttaaaaaaaataagacatacaaattgactaaattacttttaatgaattaaaatcaccaccctttaatattaaattacaccatcagctccttatattataaaagatttatattaccttctttaaatcaaacacgtttacattaattacctacaccatttgacg

SEQ ID NO: 3278 - DNA, 200 bp, Conyza canadensis
cgtcaaatggtgtaggtaattaatgtaaacgtgtttgatttaaagaaggtaatataaatcttttataatataaggagctgatggtgtaatttaatattaaagggtggtgattttaattcattaaaagtaatttagtcaatttgtatgtcttattttttttaactttcaatatgggattataacttttatatagaagtata

SEQ ID NO: 3279 - DNA, 200 bp, Conyza canadensis
cattaattacctacaccatttgacgtcgtgaccaccatcaccatccgtcgccgccatcatactaccacattgcgcgataatgtgctagttatatacctagagattattggtggaattggttgaaatatacgagtctttattttgtcaacgttatacactcgaggggtagaactgaacaaattatgtatgtacttggtgga

SEQ ID NO: 3280 - DNA, 200 bp, Conyza canadensis
tccaccaagtacatacataatttgttcagttctacccctcgagtgtataacgttgacaaaataaagactcgtatatttcaaccaattccaccaataatctctaggtatataactagcacattatcgcgcaatgtggtagtatgatggcggcgacggatggtgatggtggtcacgacgtcaaatggtgtaggtaattaatg

SEQ ID NO: 3281 - DNA, 200 bp, Conyza canadensis
acaaattatgtatgtacttggtggaacggtgggacaaaatgaggagaaaagctatataatacttgtccctgacttcttgagccattttaatgaagcaaatgtcctccaaaaaaccttttttcttcgggtcgagcgttagcatcattataacattttagactaatttctaagcattccattatgatcctcagtataccaga

SEQ ID NO: 3282 - DNA, 200 bp, Conyza canadensis
tctggtatactgaggatcataatggaatgcttagaaattagtctaaaatgttataatgatgctaacgctcgacccgaagaaaaaaggttttttggaggacatttgcttcattaaaatggctcaagaagtcagggacaagtattatatagcttttctcctcattttgtcccaccgttccaccaagtacatacataatttgt

SEQ ID NO: 3283 - DNA, 200 bp, Conyza canadensis
ccattatgatcctcagtataccagactttatacagctttgagaaataaaacacttgatatttcttgcacaaatatttgccattatgatctcagtataccagactttataaagattatatatacaaaacccaagtaacccaagacttaacaacattcgacttctaaccttaataagtaatacatcacatacccatccccat

SEQ ID NO: 3284 - DNA, 200 bp, Conyza canadensis
atggggatgggtatgtgatgtattacttattaaggttagaagtcgaatgttgttaagtcttgggttacttgggttttgtatatataatctttataaagtctggtatactgagatcataatggcaaatatttgtgcaagaaatatcaagtgttttatttctcaaagctgtataaagtctggtatactgaggatcataatgg

SEQ ID NO: 3285 - DNA, 200 bp, Conyza canadensis
taatacatcacatacccatccccatcccatccacccaaaagccgagaaaaaaaaaagttatgaacacataattaacacttatactcgaggcaaaaaaaactctcaataaccatgccctcttctggagacctggacaacgtataagaatcattctcttgtcaaaatgaatatatatcgagatcaggaagatgatcacctca

SEQ ID NO: 3286 - DNA, 200 bp, Conyza canadensis
tgaggtgatcatcttcctgatctcgatatatattcattttgacaagagaatgattcttatacgttgtccaggtctccagaagagggcatggttattgagagttttttttgcctcgagtataagtgttaattatgtgttcataacttttttttttctcggcttttgggtggatgggatggggatgggtatgtgatgtatta

SEQ ID NO: 3287 - DNA, 200 bp, Conyza canadensis
cgagatcaggaagatgatcacctcatcttgtgaataactaagccagataactcttaaggagtatgcagatcgcgtaaatggtcaacaacatcacgtgaaccagtcaaccacttgatatcagaacggtgaagtacatttgcatggacacgggctgaattatcaggtttctgctccataggcattgacctctctgaaaagct

SEQ ID NO: 3288 - DNA, 200 bp, Conyza canadensis
agcttttcagagaggtcaatgcctatggagcagaaacctgataattcagcccgtgtccatgcaaatgtacttcaccgttctgatatcaagtggttgactggttcacgtgatgttgttgaccatttacgcgatctgcatactccttaagagttatctggcttagttattcacaagatgaggtgatcatcttcctgatctcg

SEQ ID NO: 3289 - DNA, 200 bp, Conyza canadensis
taggcattgacctctctgaaaagctgtgggtatggcgcacacgaactctgtgacattttgtttctgttgtacagctgcccctcacttcaaccatcaacataacttccttatcacgaacgtcttcgcaccagcagttttgcggagcaccatctacatattcctctagggtttcatatccttggtgatgaactgatatctct

SEQ ID NO: 3290 - DNA, 200 bp, Conyza canadensis
agagatatcagttcatcaccaaggatatgaaaccctagaggaatatgtagatggtgctccgcaaaactgctggtgcgaagacgttcgtgataaggaagttatgttgatggttgaagtgaggggcagctgtacaacagaaacaaaatgtcacagagttcgtgtgcgccatacccacagcttttcagagaggtcaatgccta

SEQ ID NO: 3291 - DNA, 200 bp, Conyza canadensis
tccttggtgatgaactgatatctctacaatatgatttggctctattatacccactgttggcttgacctggttcaaagcaatagacaattgttagctaccttcaccgtgagtgcatcacaacaaattttttagtccaatgttcaatgcatgtgataaattcacctcaagccatcgtggaaagccataagaacctcttggac

SEQ ID NO: 3292 - DNA, 200 bp, Conyza canadensis
gtccaagaggttcttatggctttccacgatggcttgaggtgaatttatcacatgcattgaacattggactaaaaaatttgttgtgatgcactcacggtgaaggtagctaacaattgtctattgctttgaaccaggtcaagccaacagtgggtataatagagccaaatcatattgtagagatatcagttcatcaccaagga

SEQ ID NO: 3293 - DNA, 200 bp, Conyza canadensis
ggaaagccataagaacctcttggacggtgactggaagcctgttttccatctttaatagtacactggccttcacatataactttaaacagagcttcatcttccccgcatttattggtaatcctcaagactgatgaatccctgtcatgaagaattatattgttcgtactgggaatagcttctggaacattgcactgttcttc

SEQ ID NO: 3294 - DNA, 200 bp, Conyza canadensis
gaagaacagtgcaatgttccagaagctattcccagtacgaacaatataattcttcatgacagggattcatcagtcttgaggattaccaataaatgcggggaagatgaagctctgtttaaagttatatgtgaaggccagtgtactattaaagatggaaaacaggcttccagtcaccgtccaagaggttcttatggctttcc

SEQ ID NO: 3295 - DNA, 200 bp, Conyza canadensis
tttgcacaatgtagcagtggtggtggtaatgatagcggcagtagggacaatgatggaagcgacggtggtggtaaatgtaaaagtatttgatgttaaatgtggtattatagttattttaagtgttggaggatctataccttaaattattacattaaggatattataggagtatattagatcgagatgtttaaattagtaaa

SEQ ID NO: 3296 - DNA, 200 bp, Conyza canadensis
tttactaatttaaacatctcgatctaatatactcctataatatccttaatgtaataatttaaggtatagatcctccaacacttaaaataactataataccacatttaacatcaaatacttttacatttaccaccaccgtcgcttccatcattgtccctactgccgctatcattaccaccaccactgctacattgtgcaaa

SEQ ID NO: 3297 - DNA, 200 bp, Conyza canadensis
agatcgagatgtttaaattagtaaataaagaagaaaaatatttttgattttttaaatgtagaaagtttaaggaaaaagaatttattttattagataatatagattataactagttgaatcgttttataaaacccgactgctttgattaaaatatcattggttataacttttaaacataggcctcgtgtcacaatccagct

SEQ ID NO: 3298 - DNA, 200 bp, Conyza canadensis
agctggattgtgacacgaggcctatgtttaaaagttataaccaatgatattttaatcaaagcagtcgggttttataaaacgattcaactagttataatctatattatctaataaaataaattctttttccttaaactttctacatttaaaaaatcaaaaatatttttcttctttatttactaatttaaacatctcgatct

SEQ ID NO: 3299 - DNA, 200 bp, Conyza canadensis
ataggcctcgtgtcacaatccagcttaaagtaaattttgacaaccttaaatcaaaagctcctcaatatataatataaccaaaaaaactcaacaaataaataaatagattaatatatatacctcaacaatggcagccgccgccgtgactacttactctgccaccgcatttcgtactcgaacaccaccaccaccaccaccac

SEQ ID NO: 3300 - DNA, 200 bp, Conyza canadensis
gtggtggtggtggtggtggtgttcgagtacgaaatgcggtggcagagtaagtagtcacggcggcggctgccattgttgaggtatatatattaatctatttatttatttgttgagtttttttggttatattatatattgaggagcttttgatttaaggttgtcaaaatttactttaagctggattgtgacacgaggcctat

SEQ ID NO: 3301 - DNA, 200 bp, Conyza canadensis
cgaacaccaccaccaccaccaccaccgtctgtcatccccaatcaactatcatatgcctccaaaaaacccaacagcaaatttgacctcaaaaaactctctgtcaaagcctccaccactggctctgttcccgcccctgttgactcaccttcatccaattcgtctagacccacgtcagccccacctccactcccccttttttt

SEQ ID NO: 3302 - DNA, 200 bp, Conyza canadensis
aaaaaaagggggagtggaggtggggctgacgtgggtctagacgaattggatgaaggtgagtcaacaggggcgggaacagagccagtggtggaggctttgacagagagttttttgaggtcaaatttgctgttgggttttttggaggcatatgatagttgattggggatgacagacggtggtggtggtggtggtggtgttcg

SEQ ID NO: 3303 - DNA, 200 bp, Conyza canadensis
ccccacctccactccccctttttttattattattaattgtttagattcatttttgctaatcatatatatatatagatttctagtcatatatctatgtttagtcttgttattttatgctgcatttcgatggggacaatggtaaaaacaatatttacattggtaatgtgtgtgtatagttgtaaaatttgcatgtttgtttt

SEQ ID NO: 3304 - DNA, 200 bp, Conyza canadensis
aaaacaaacatgcaaattttacaactatacacacacattaccaatgtaaatattgtttttaccattgtccccatcgaaatgcagcataaaataacaagactaaacatagatatatgactagaaatctatatatatatatgattagcaaaaatgaatctaaacaattaataataataaaaaaagggggagtggaggtgggg

SEQ ID NO: 3305 - DNA, 200 bp, Conyza canadensis
gttgtaaaatttgcatgtttgttttgtttgtgttttcagtcattatgcaacttagtattcttaaatttatgtttttttcttttcaaatgagattttgttacggattgatcagtgtagatgagtgaagtgttagcctaagggaatagggatagggaatctcgatgtatcggttgcaatagttattcttctagtgacccaca

SEQ ID NO: 3306 - DNA, 200 bp, Conyza canadensis
tgtgggtcactagaagaataactattgcaaccgatacatcgagattccctatccctattcccttaggctaacacttcactcatctacactgatcaatccgtaacaaaatctcatttgaaaagaaaaaaacataaatttaagaatactaagttgcataatgactgaaaacacaaacaaaacaaacatgcaaattttacaac

SEQ ID NO: 3307 - DNA, 200 bp, Conyza canadensis
atagttattcttctagtgacccacaaaataatttgaagaatgtttgtctagtggggcgtatggggttaccttgctatcgaggtctagggtgagaatcaaactataagtatagaaggttaagatagagcttaagccttaaggtgtgagtgagtgaagaataaagcatattttgaagatgatggtgatctttggttgaattg

SEQ ID NO: 3308 - DNA, 200 bp, Conyza canadensis
caattcaaccaaagatcaccatcatcttcaaaatatgctttattcttcactcactcacaccttaaggcttaagctctatcttaaccttctatacttatagtttgattctcaccctagacctcgatagcaaggtaaccccatacgccccactagacaaacattcttcaaattattttgtgggtcactagaagaataactat

SEQ ID NO: 3309 - DNA, 200 bp, Conyza canadensis
atgatggtgatctttggttgaattgttggatatgtagtcataactagtggggttgctgcctgagcctgcatcgtgtgtcggctactagtatggattctgggacgactacggattgggccccagatacacagtattccctttgtcaggattacacttggagcacaatgcatagtctaggttaatgatgacagagttgccac

SEQ ID NO: 3310 - DNA, 200 bp, Conyza canadensis
gtggcaactctgtcatcattaacctagactatgcattgtgctccaagtgtaatcctgacaaagggaatactgtgtatctggggcccaatccgtagtcgtcccagaatccatactagtagccgacacacgatgcaggctcaggcagcaaccccactagttatgactacatatccaacaattcaaccaaagatcaccatcat

SEQ ID NO: 3311 - DNA, 200 bp, Conyza canadensis
aggttaatgatgacagagttgccacctactcttgaaatctatagtacacttcaagttgacgttatatcagagagctacttagggtgttctatgttatttaacctctcttgttgatattctctggggtgttttttgggtatttgattgctcttggatttcgttgattcccttttaagtgatcctggcttttgatttcccct

SEQ ID NO: 3312 - DNA, 200 bp, Conyza canadensis
aggggaaatcaaaagccaggatcacttaaaagggaatcaacgaaatccaagagcaatcaaatacccaaaaaacaccccagagaatatcaacaagagaggttaaataacatagaacaccctaagtagctctctgatataacgtcaacttgaagtgtactatagatttcaagagtaggtggcaactctgtcatcattaacct

SEQ ID NO: 3313 - DNA, 200 bp, Conyza canadensis
gtgatcctggcttttgatttcccctatgaggtcgttgatacccactgaagcttttttggttattgtcccatattaagtttttttgggggcttattggtggtttgatatttgatcacatggtattgtattttttttcttcaaatattgaagttatgagtgttgtttctaccatgtgataaatatctaagtctatgcttagt

SEQ ID NO: 3314 - DNA, 200 bp, Conyza canadensis
actaagcatagacttagatatttatcacatggtagaaacaacactcataacttcaatatttgaagaaaaaaaatacaataccatgtgatcaaatatcaaaccaccaataagcccccaaaaaaacttaatatgggacaataaccaaaaaagcttcagtgggtatcaacgacctcataggggaaatcaaaagccaggatcac

SEQ ID NO: 3315 - DNA, 200 bp, Conyza canadensis
ataaatatctaagtctatgcttagtaactacatttgatacttaagttagaactggatattgaacttttactaaccgatatggttaactaaacaccataggcattgatatctgatgccatttaattgcgtgtagttatttaaattatttgctttccttatttatactttgtcatttgccttcatatattcttatgaaaggt

SEQ ID NO: 3316 - DNA, 200 bp, Conyza canadensis
acctttcataagaatatatgaaggcaaatgacaaagtataaataaggaaagcaaataatttaaataactacacgcaattaaatggcatcagatatcaatgcctatggtgtttagttaaccatatcggttagtaaaagttcaatatccagttctaacttaagtatcaaatgtagttactaagcatagacttagatatttat

SEQ ID NO: 3317 - DNA, 200 bp, Conyza canadensis
gccttcatatattcttatgaaaggtttacatattaatttctcgatatatctttataaataaagtttaatgtaacacagggtgaggcgccacactatttcagtatttgttggtgatgagagtggaatgataaatcggattgcaggagttttcgcaaggaggggatataatatcgagtctcttgctgttggtttaaacaagg

SEQ ID NO: 3318 - DNA, 200 bp, Conyza canadensis
ccttgtttaaaccaacagcaagagactcgatattatatcccctccttgcgaaaactcctgcaatccgatttatcattccactctcatcaccaacaaatactgaaatagtgtggcgcctcaccctgtgttacattaaactttatttataaagatatatcgagaaattaatatgtaaacctttcataagaatatatgaaggc

SEQ ID NO: 3319 - DNA, 200 bp, Conyza canadensis
tctcttgctgttggtttaaacaaggacaaagctcttttcactatagttgtatctggaaccgaaagggtgttgcagcaagttatgaaacagcttctaaagcttgttaatgttttgaaggttgacttctgtttcaagtttaaaccatcgatccattatggttattttcttttttaagtttctcgaagttgactaccatgaac

SEQ ID NO: 3320 - DNA, 200 bp, Conyza canadensis
gttcatggtagtcaacttcgagaaacttaaaaaagaaaataaccataatggatcgatggtttaaacttgaaacagaagtcaaccttcaaaacattaacaagctttagaagctgtttcataacttgctgcaacaccctttcggttccagatacaactatagtgaaaagagctttgtccttgtttaaaccaacagcaagaga

SEQ ID NO: 3321 - DNA, 200 bp, Conyza canadensis
tttctcgaagttgactaccatgaacaggtcgaagatatctcaaaggagccacaagtagaacgtgagttgatgcttatcaagatcaatgcagatccaagttaccgtatggaggtaattatgcaatgttaatcatgtttgggtttttggctgttattcataacatactacattattctgattcatggagacgaacatatttc

SEQ ID NO: 3322 - DNA, 200 bp, Conyza canadensis
gaaatatgttcgtctccatgaatcagaataatgtagtatgttatgaataacagccaaaaacccaaacatgattaacattgcataattacctccatacggtaacttggatctgcattgatcttgataagcatcaactcacgttctacttgtggctcctttgagatatcttcgacctgttcatggtagtcaacttcgagaaa

SEQ ID NO: 3323 - DNA, 200 bp, Conyza canadensis
tgattcatggagacgaacatatttccatgacgggggtgttttagatatgccatttaaattgttcatatgattagtgtgacctttagtactgataacataagtgtttggataaacagattttgcttatgactgtattatgattatctagtggacaagtaaaatgtgtgagaatatgttatctcaccatattcttatggttt

SEQ ID NO: 3324 - DNA, 200 bp, Conyza canadensis
aaaccataagaatatggtgagataacatattctcacacattttacttgtccactagataatcataatacagtcataagcaaaatctgtttatccaaacacttatgttatcagtactaaaggtcacactaatcatatgaacaatttaaatggcatatctaaaacacccccgtcatggaaatatgttcgtctccatgaatca

SEQ ID NO: 3325 - DNA, 200 bp, Conyza canadensis
ttatctcaccatattcttatggttttgattttcaggttaagtggttagtggacatctttagagctagaatcgttgatatctcacaggactcgctaacaatcgaggtgatggaagttgaaattttactttaacctttaaagtgtttactgttttttcaggcacaactgatctggactcagttttgggtctttatgtattgt

SEQ ID NO: 3326 - DNA, 200 bp, Conyza canadensis
acaatacataaagacccaaaactgagtccagatcagttgtgcctgaaaaaacagtaaacactttaaaggttaaagtaaaatttcaacttccatcacctcgattgttagcgagtcctgtgagatatcaacgattctagctctaaagatgtccactaaccacttaacctgaaaatcaaaaccataagaatatggtgagataa

SEQ ID NO: 3327 - DNA, 200 bp, Conyza canadensis
tcagttttgggtctttatgtattgtaatttacaaaagtataatgctctatagaggacctgtgttagtttgtaatttttcaatgacctttttgataaatatgaaattcgtacacactttgactctttggaatttaggtaactggtgacccagggaaaatggttgcagtgcaaagaaacctgagtaaatttgggattcgaga

SEQ ID NO: 3328 - DNA, 200 bp, Conyza canadensis
tctcgaatcccaaatttactcaggtttctttgcactgcaaccattttccctgggtcaccagttacctaaattccaaagagtcaaagtgtgtacgaatttcatatttatcaaaaaggtcattgaaaaattacaaactaacacaggtcctctatagagcattatacttttgtaaattacaatacataaagacccaaaactga

SEQ ID NO: 3329 - DNA, 200 bp, Conyza canadensis
acctgagtaaatttgggattcgagaagttgcaaggactggaaaagtaagttattattaagtctctattttttcctattcttctttcatattgattgttaaattctgtatgccttagattgctttgagaagagaaaaaatgggcgaggatgctcctttctggcgtttttcagcagcttcatatccagaccttgaagaaatg

SEQ ID NO: 3330 - DNA, 200 bp, Conyza canadensis
catttcttcaaggtctggatatgaagctgctgaaaaacgccagaaaggagcatcctcgcccattttttctcttctcaaagcaatctaaggcatacagaatttaacaatcaatatgaaagaagaataggaaaaaatagagacttaataataacttacttttccagtccttgcaacttctcgaatcccaaatttactcaggt

SEQ ID NO: 3331 - DNA, 200 bp, Conyza canadensis
ttcatatccagaccttgaagaaatgaacgcaagaactactcttcaggccaaaaaaagtgcagaatttatagaaaccgatatgtctgttggggtaagttgctttctctttttgactgacgctaacctgggttgtagaggttgcaaattagttgggaaattgggtcaaagcggaatttttttttgcggatcggctaatgttg

SEQ ID NO: 3332 - DNA, 200 bp, Conyza canadensis
caacattagccgatccgcaaaaaaaaattccgctttgacccaatttcccaactaatttgcaacctctacaacccaggttagcgtcagtcaaaaagagaaagcaacttaccccaacagacatatcggtttctataaattctgcactttttttggcctgaagagtagttcttgcgttcatttcttcaaggtctggatatgaa

SEQ ID NO: 3333 - DNA, 200 bp, Conyza canadensis
tttttttgcggatcggctaatgttgacctgaattggtgtttgtcccaagttcagtttgatcttttatacataattagtttgtaaaacataactaaactttttatatatgtaaatgcaactatacggcattgcttttcaacaaaatgatataggaggcaccattgaaaagaaagattttagtggttttatgcttaaaacta

SEQ ID NO: 3334 - DNA, 200 bp, Conyza canadensis
tagttttaagcataaaaccactaaaatctttcttttcaatggtgcctcctatatcattttgttgaaaagcaatgccgtatagttgcatttacatatataaaaagtttagttatgttttacaaactaattatgtataaaagatcaaactgaacttgggacaaacaccaattcaggtcaacattagccgatccgcaaaaaaa

SEQ ID NO: 3335 - DNA, 200 bp, Conyza canadensis
tttagtggttttatgcttaaaactacatttggcaactttcagccgaagctctttgtttttaaacttatttgctttactcgtttgacccgttataatataaattagtctggttcgacgattatctatcttgcacgatgtagtttagacttgaatacttcatacacagatggtgaatgaggtggtatttcttatctgtatta

SEQ ID NO: 3336 - DNA, 200 bp, Conyza canadensis
taatacagataagaaataccacctcattcaccatctgtgtatgaagtattcaagtctaaactacatcgtgcaagatagataatcgtcgaaccagactaatttatattataacgggtcaaacgagtaaagcaaataagtttaaaaacaaagagcttcggctgaaagttgccaaatgtagttttaagcataaaaccactaaa

SEQ ID NO: 3337 - DNA, 200 bp, Conyza canadensis
gaggtggtatttcttatctgtattaaattatatttgtgaagggagatgtttatccagtagagcaaggagatgactttccatttaatcaagttcttgatgcacactggggtgttcttaacgaagaagatgtaagaacttgatatcacttctcatatttcacaaatgtcactgaggtgcattgaagtatcagtaatttttag

SEQ ID NO: 3338 - DNA, 200 bp, Conyza canadensis
ctaaaaattactgatacttcaatgcacctcagtgacatttgtgaaatatgagaagtgatatcaagttcttacatcttcttcgttaagaacaccccagtgtgcatcaagaacttgattaaatggaaagtcatctccttgctctactggataaacatctcccttcacaaatataatttaatacagataagaaataccacctc

SEQ ID NO: 3339 - DNA, 200 bp, Conyza canadensis
gcattgaagtatcagtaatttttagtttgatgtttctagacaagcgggcttcggtcacacactttatcgatggttgtaaatgactctcccggagttttaaatatagtaacaggagtttttgctcgtagaggttacaatattcaggtatgttttttgtattccggatatttcattaatttgcttcctgaacatatggaagt

SEQ ID NO: 3340 - DNA, 200 bp, Conyza canadensis
acttccatatgttcaggaagcaaattaatgaaatatccggaatacaaaaaacatacctgaatattgtaacctctacgagcaaaaactcctgttactatatttaaaactccgggagagtcatttacaaccatcgataaagtgtgtgaccgaagcccgcttgtctagaaacatcaaactaaaaattactgatacttcaatgc

SEQ ID NO: 3341 - DNA, 200 bp, Conyza canadensis
atttgcttcctgaacatatggaagtaccagaggttcaagtagtttggtgtttgcatttttgattcagagtctagcagttggtcatgcagaagttgaagggcgatcccgcatcacaactgtcgttcccggtacaaatgagtctatcagcaagttggttcaacaactatacaagttgatagatgttcatgatgtgagtatat

SEQ ID NO: 3342 - DNA, 200 bp, Conyza canadensis
atatactcacatcatgaacatctatcaacttgtatagttgttgaaccaacttgctgatagactcatttgtaccgggaacgacagttgtgatgcgggatcgcccttcaacttctgcatgaccaactgctagactctgaatcaaaaatgcaaacaccaaactacttgaacctctggtacttccatatgttcaggaagcaaat

SEQ ID NO: 3343 - DNA, 200 bp, Conyza canadensis
atagatgttcatgatgtgagtatatattgtagttggaaaatgcttcatatgttaagtttattatgaatgagcagtactactagtctcattttccgccctccaaggtccatttgtagttgtttacgacccagttcttatggaaaggtagatttgggctgtgctggtaaaattgaaaggtttaactaataaggaaatgggtc

SEQ ID NO: 3344 - DNA, 200 bp, Conyza canadensis
gacccatttccttattagttaaacctttcaattttaccagcacagcccaaatctacctttccataagaactgggtcgtaaacaactacaaatggaccttggagggcggaaaatgagactagtagtactgctcattcataataaacttaacatatgaagcattttccaactacaatatatactcacatcatgaacatctat

SEQ ID NO: 3345 - DNA, 200 bp, Conyza canadensis
ggtttaactaataaggaaatgggtcaagtggttcgaacaggttgaaagtttcccagagagtgatactcgtataattattgtaattctcttgatcgcttttatcaccagtctgtaaaaaacgaaaaagtttgacaagatgtgtttcacttcaaataggttatagaaaaatagatttattaaaataatgtaatttttgttat

SEQ ID NO: 3346 - DNA, 200 bp, Conyza canadensis
ataacaaaaattacattattttaataaatctatttttctataacctatttgaagtgaaacacatcttgtcaaactttttcgttttttacagactggtgataaaagcgatcaagagaattacaataattatacgagtatcactctctgggaaactttcaacctgttcgaaccacttgacccatttccttattagttaaacc

SEQ ID NO: 3347 - DNA, 200 bp, Conyza canadensis
attaaaataatgtaatttttgttattttatttgacccaaaaggactttgaatagtaccaaaaggactcttcattgacccagtacccacctgtctgttttgtcacccctacccatttggttgctattgatactactgaggagatataattattctattacaccaccattttgtagctcttgatctggtttctagttcacat

SEQ ID NO: 3348 - DNA, 200 bp, Conyza canadensis
atgtgaactagaaaccagatcaagagctacaaaatggtggtgtaatagaataattatatctcctcagtagtatcaatagcaaccaaatgggtaggggtgacaaaacagacaggtgggtactgggtcaatgaagagtccttttggtactattcaaagtccttttgggtcaaataaaataacaaaaattacattattttaat

SEQ ID NO: 3349 - DNA, 200 bp, Conyza canadensis
tcttgatctggtttctagttcacattccagctcttgaggctgcttttctaattcatttgactgatacttgtttttctgtttaggtgatagacctaacatccgtgccatttgctgagcgagagttaatgctgattaaagttgccgtcaattccacagctcgacgcagtgttcttgatattgcaagcatatttagagctaaa

SEQ ID NO: 3350 - DNA, 200 bp, Conyza canadensis
tttagctctaaatatgcttgcaatatcaagaacactgcgtcgagctgtggaattgacggcaactttaatcagcattaactctcgctcagcaaatggcacggatgttaggtctatcacctaaacagaaaaacaagtatcagtcaaatgaattagaaaagcagcctcaagagctggaatgtgaactagaaaccagatcaaga

SEQ ID NO: 3351 - DNA, 200 bp, Conyza canadensis
tattgcaagcatatttagagctaaagccgtagatgtatcagatcacacaattacactcgaggtgaaatttaaatataattcacttgcatattacacgtgttgactgaaatttcatgatcctactattgaacgttacaaaatttcatgatccttacctttattttcacagtttttctgtttttctttccccgttgggttgt

SEQ ID NO: 3352 - DNA, 200 bp, Conyza canadensis
acaacccaacggggaaagaaaaacagaaaaactgtgaaaataaaggtaaggatcatgaaattttgtaacgttcaatagtaggatcatgaaatttcagtcaacacgtgtaatatgcaagtgaattatatttaaatttcacctcgagtgtaattgtgtgatctgatacatctacggctttagctctaaatatgcttgcaata

SEQ ID NO: 3353 - DNA, 200 bp, Conyza canadensis
tgtttttctttccccgttgggttgtttcagcaataaattgtttttcttgtattttccaggtcactggagatgtaaataagatggtagcattacagagactgttagagccatgtggaatttgcgaggtttgtttgtgaaatctgttatttataatatttctatttgaacatgtcaccttccagtttaaaacccacagcttg

SEQ ID NO: 3354 - DNA, 200 bp, Conyza canadensis
caagctgtgggttttaaactggaaggtgacatgttcaaatagaaatattataaataacagatttcacaaacaaacctcgcaaattccacatggctctaacagtctctgtaatgctaccatcttatttacatctccagtgacctggaaaatacaagaaaaacaatttattgctgaaacaacccaacggggaaagaaaaaca

SEQ ID NO: 3355 - DNA, 200 bp, Conyza canadensis
cttccagtttaaaacccacagcttggtttgctcatttggaaccatgaacaatctcattgttcgtgaccaaactacagttctagaactgaactagagtggtcagtctttttgtgttgcagtcctatttacttaatccttgatcattatttgtaggttgcaagaacagggagggtggcactgtctcgtgagtctggtgttga

SEQ ID NO: 3356 - DNA, 200 bp, Conyza canadensis
tcaacaccagactcacgagacagtgccaccctccctgttcttgcaacctacaaataatgatcaaggattaagtaaataggactgcaacacaaaaagactgaccactctagttcagttctagaactgtagtttggtcacgaacaatgagattgttcatggttccaaatgagcaaaccaagctgtgggttttaaactggaag

SEQ ID NO: 3357 - DNA, 200 bp, Conyza canadensis
cactgtctcgtgagtctggtgttgattcatcttaccttcgtggctattcctatcccgtttgattcagtcatttagagtgtctttttgtttttggttgctcggagtatagaattatatattttcaatgattgaatatctacaagtcgttttagcatgtatgttttaataaaagctgctgttttgaatgagggtttggtatg

SEQ ID NO: 3358 - DNA, 200 bp, Conyza canadensis
cataccaaaccctcattcaaaacagcagcttttattaaaacatacatgctaaaacgacttgtagatattcaatcattgaaaatatataattctatactccgagcaaccaaaaacaaaaagacactctaaatgactgaatcaaacgggataggaatagccacgaaggtaagatgaatcaacaccagactcacgagacagtg

SEQ ID NO: 3359 - DNA, 200 bp, Conyza canadensis
ctgttttgaatgagggtttggtatgaacccaatttgaaagattttgttttttctttaaataggcgcctaagctcaacaagggcacatggttagattggttgaactagttttttagggaaacatgttcctcatcaagttctaatttgcaagattgaccgaacccatgtccctgccattttttccgttcatgtcttgagccg

SEQ ID NO: 3360 - DNA, 200 bp, Conyza canadensis
cggctcaagacatgaacggaaaaaatggcagggacatgggttcggtcaatcttgcaaattagaacttgatgaggaacatgtttccctaaaaaactagttcaaccaatctaaccatgtgcccttgttgagcttaggcgcctatttaaagaaaaaacaaaatctttcaaattgggttcataccaaaccctcattcaaaacag

SEQ ID NO: 3361 - DNA, 200 bp, Conyza canadensis
ttttttccgttcatgtcttgagccgaagttataactcaggtttaagcacaccctcattaaaactcttctaataaattgaatggaatttttagtcctcaaatatcctcgcgagattttagctcgtgatttatgctgcccacagagaatatgtggtttttgatgaccctatttttcagttaatttccaaacatcatccacca

SEQ ID NO: 3362 - DNA, 200 bp, Conyza canadensis
tggtggatgatgtttggaaattaactgaaaaatagggtcatcaaaaaccacatattctctgtgggcagcataaatcacgagctaaaatctcgcgaggatatttgaggactaaaaattccattcaatttattagaagagttttaatgagggtgtgcttaaacctgagttataacttcggctcaagacatgaacggaaaaaa

SEQ ID NO: 3363 - DNA, 200 bp, Conyza canadensis
gttaatttccaaacatcatccaccaattccactctttttgggagtcaaaatttattgacaaaattagaaagagagaaacaaccaaaaatcatagaggaattaaaaataaaaatatgaaaaaagatgatctaacatgagaatggacatcgaacatggaatataatgttaacaaatatccacaaagactgaattaatcagag

SEQ ID NO: 3364 - DNA, 200 bp, Conyza canadensis
ctctgattaattcagtctttgtggatatttgttaacattatattccatgttcgatgtccattctcatgttagatcatcttttttcatatttttatttttaattcctctatgatttttggttgtttctctctttctaattttgtcaataaattttgactcccaaaaagagtggaattggtggatgatgtttggaaattaac

SEQ ID NO: 3365 - DNA, 200 bp, Conyza canadensis
tccacaaagactgaattaatcagagaatgtggcttcagaaaagcggaagtagtttgcagggtggtgatcgaatgcagaggaagggaactggaaccgccatggttgcggtggctatagacaaggacaaatacagccagcaagcgcttaaatggtccattgaacatcttcttacccgtggacaaaccgttgtcctcattcat

SEQ ID NO: 3366 - DNA, 200 bp, Conyza canadensis
atgaatgaggacaacggtttgtccacgggtaagaagatgttcaatggaccatttaagcgcttgctggctgtatttgtccttgtctatagccaccgcaaccatggcggttccagttcccttcctctgcattcgatcaccaccctgcaaactacttccgcttttctgaagccacattctctgattaattcagtctttgtgga

SEQ ID NO: 3367 - DNA, 200 bp, Conyza canadensis
tggacaaaccgttgtcctcattcatgtcatccggaaaacccctcctacaggcaatatttgtattctgtcaaacgattcagatattaacattgtttataacaactaattgaaacagagagagagagagagagagagagagagagagaaccttataatcccatatcaatttcaactatttgaccaatatataacccctaaca

SEQ ID NO: 3368 - DNA, 200 bp, Conyza canadensis
tgttaggggttatatattggtcaaatagttgaaattgatatgggattataaggttctctctctctctctctctctctctctctctctgtttcaattagttgttataaacaatgttaatatctgaatcgtttgacagaatacaaatattgcctgtaggaggggttttccggatgacatgaatgaggacaacggtttgtcca

SEQ ID NO: 3369 - DNA, 200 bp, Conyza canadensis
tttgaccaatatataacccctaacacgattgttgagtcacataatccttgaaacaagataaaacaattagactgcgttaagttacagaaaacgttttctaattttccacttagaattcataagaaaatggaaggggttttttagttctagaaacttaaacttctgaaaatgcgtttagttgtaagtggaaaacgtaagga

SEQ ID NO: 3370 - DNA, 200 bp, Conyza canadensis
tccttacgttttccacttacaactaaacgcattttcagaagtttaagtttctagaactaaaaaaccccttccattttcttatgaattctaagtggaaaattagaaaacgttttctgtaacttaacgcagtctaattgttttatcttgtttcaaggattatgtgactcaacaatcgtgttaggggttatatattggtcaaa

SEQ ID NO: 3371 - DNA, 200 bp, Conyza canadensis
tagttgtaagtggaaaacgtaaggagtttttcatttttaaataacagatgtgccaatatgaatgtagggggagggattgatgcatctgctgcaaacaagcaacaaactgagaagcaaacaagagatttgttcctcacgttccattgcttctgtacgcgtaaagaagtacgtgttttactactatctgtcttgttgggtat

SEQ ID NO: 3372 - DNA, 200 bp, Conyza canadensis
atacccaacaagacagatagtagtaaaacacgtacttctttacgcgtacagaagcaatggaacgtgaggaacaaatctcttgtttgcttctcagtttgttgcttgtttgcagcagatgcatcaatccctccccctacattcatattggcacatctgttatttaaaaatgaaaaactccttacgttttccacttacaacta

SEQ ID NO: 3373 - DNA, 200 bp, Conyza canadensis
tactactatctgtcttgttgggtatcttttgcatggttttgctaaaattgttgcactgcagatacagtgttacgatgttatacttgaagatgcaaatatagcaaaagcactcacggaatatgcatcttatgctgccatagaatatttggtccttggtgcctcatcacggcatggtttcatcaggtcatttattcaaatga

SEQ ID NO: 3374 - DNA, 200 bp, Conyza canadensis
tcatttgaataaatgacctgatgaaaccatgccgtgatgaggcaccaaggaccaaatattctatggcagcataagatgcatattccgtgagtgcttttgctatatttgcatcttcaagtataacatcgtaacactgtatctgcagtgcaacaattttagcaaaaccatgcaaaagatacccaacaagacagatagtagta

SEQ ID NO: 3375 - DNA, 200 bp, Conyza canadensis
ttcatcaggtcatttattcaaatgaaatttttgcaaaacctttaaatgttttaacgattatcacctttgagttaatattgtaagcatttctataatgatagctgaatgcttggactaatgagtaacgattaaaacatttataaacagatttcggagttctgatgtgccaagccaagtaatgaaatcgataccagatttct

SEQ ID NO: 3376 - DNA, 200 bp, Conyza canadensis
agaaatctggtatcgatttcattacttggcttggcacatcagaactccgaaatctgtttataaatgttttaatcgttactcattagtccaagcattcagctatcattatagaaatgcttacaatattaactcaaaggtgataatcgttaaaacatttaaaggttttgcaaaaatttcatttgaataaatgacctgatgaa

SEQ ID NO: 3377 - DNA, 200 bp, Conyza canadensis
gtaatgaaatcgataccagatttctgcactgtttatgtcatctcaaaaggaaagatatcctcagcaaagaaatcttcacgaacagtcccgtttccatctcctatacgtgagaaaatagaagaacaatctaacaccaactttgaagcaagtgtacgccgcaagaatagttttaacattaaaagtcagtcatttattttcag

SEQ ID NO: 3378 - DNA, 200 bp, Conyza canadensis
ctgaaaataaatgactgacttttaatgttaaaactattcttgcggcgtacacttgcttcaaagttggtgttagattgttcttctattttctcacgtataggagatggaaacgggactgttcgtgaagatttctttgctgaggatatctttccttttgagatgacataaacagtgcagaaatctggtatcgatttcattac

SEQ ID NO: 3379 - DNA, 200 bp, Conyza canadensis
tttgggattcgagaagttgcaaggactggaaaaattgctttgagaagagaaaaaatgggcgaggatgctcctttctggcgtttttcagcagcttcatatccagaccttgaagaaatgaacgcaagaactactcttcaggccaaaaaaagtgcagaatttatagaaaccgatatgtctgttgggggagatgtttatccagt

SEQ ID NO: 3380 - DNA, 200 bp, Conyza canadensis
actggataaacatctcccccaacagacatatcggtttctataaattctgcactttttttggcctgaagagtagttcttgcgttcatttcttcaaggtctggatatgaagctgctgaaaaacgccagaaaggagcatcctcgcccattttttctcttctcaaagcaatttttccagtccttgcaacttctcgaatcccaaa

SEQ ID NO: 3381 - DNA, 200 bp, Conyza canadensis
ctgttgggggagatgtttatccagtagagcaaggagatgactttccatttaatcaagttcttgatgcacactggggtgttcttaacgaagaagatacaagcgggcttcggtcacacactttatcgatggttgtaaatgactctcccggagttttaaatatagtaacaggagtttttgctcgtagaggttacaatattcag

SEQ ID NO: 3382 - DNA, 200 bp, Conyza canadensis
ctgaatattgtaacctctacgagcaaaaactcctgttactatatttaaaactccgggagagtcatttacaaccatcgataaagtgtgtgaccgaagcccgcttgtatcttcttcgttaagaacaccccagtgtgcatcaagaacttgattaaatggaaagtcatctccttgctctactggataaacatctcccccaacag

SEQ ID NO: 3383 - DNA, 200 bp, Digitaria sanguinalis
ataaatataaagggccgtggccgactgaggacgaacaactccaaacgaatatttgcatattacttttatctctcaaaccctaacttttccaatcttttgctttccttcttcgtctccacggtgattcagaaggttctaagtggccctgtcaaccttagaacaaccctaggttcgttgcctccgacgaggtctctcccgag

SEQ ID NO: 3384 - DNA, 200 bp, Digitaria sanguinalis
ctcgggagagacctcgtcggaggcaacgaacctagggttgttctaaggttgacagggccacttagaaccttctgaatcaccgtggagacgaagaaggaaagcaaaagattggaaaagttagggtttgagagataaaagtaatatgcaaatattcgtttggagttgttcgtcctcagtcggccacggccctttatatttat

SEQ ID NO: 3385 - DNA, 200 bp, Digitaria sanguinalis
tgcctccgacgaggtctctcccgaggcggcgatcgtaggcttttgcagcgacctagctacaggcggtctaaccggctgcgcagagaggcgccggcgaggtgatttcaactttcgcgcgatccagcgcacgcgtttgttgaccgaaaaggcgtcaacactttctgattcttagatgaaataaagcctgcaaatgaactttt

SEQ ID NO: 3386 - DNA, 200 bp, Digitaria sanguinalis
aaaagttcatttgcaggctttatttcatctaagaatcagaaagtgttgacgccttttcggtcaacaaacgcgtgcgctggatcgcgcgaaagttgaaatcacctcgccggcgcctctctgcgcagccggttagaccgcctgtagctaggtcgctgcaaaagcctacgatcgccgcctcgggagagacctcgtcggaggca

SEQ ID NO: 3387 - DNA, 200 bp, Digitaria sanguinalis
aaataaagcctgcaaatgaactttttttttcagtccaacaattcatttcaacagaagtaagatcggtagttgacagtacagacacagaagacttgaattgaaactaaggttcctgacgtgcaaattatatatggagacctgaatggcaacaccatttccttgtttgccgatttcagaacatgaatagccatcgggatgtc

SEQ ID NO: 3388 - DNA, 200 bp, Digitaria sanguinalis
gacatcccgatggctattcatgttctgaaatcggcaaacaaggaaatggtgttgccattcaggtctccatatataatttgcacgtcaggaaccttagtttcaattcaagtcttctgtgtctgtactgtcaactaccgatcttacttctgttgaaatgaattgttggactgaaaaaaaaagttcatttgcaggctttattt

SEQ ID NO: 3389 - DNA, 200 bp, Digitaria sanguinalis
gaacatgaatagccatcgggatgtctgaatgattcagtttcatgttcaacaaacacatgtctatttggttaacttacgatgtatgtctattcagaacatggcaatatcagaacatgaatttgccggcgtgcactctccagtccgtccggggcgtccacctccttagcttgccggcaaagggcaaagttgcctccacgcca

SEQ ID NO: 3390 - DNA, 200 bp, Digitaria sanguinalis
tggcgtggaggcaactttgccctttgccggcaagctaaggaggtggacgccccggacggactggagagtgcacgccggcaaattcatgttctgatattgccatgttctgaatagacatacatcgtaagttaaccaaatagacatgtgtttgttgaacatgaaactgaatcattcagacatcccgatggctattcatgttc

SEQ ID NO: 3391 - DNA, 200 bp, Digitaria sanguinalis
aaagggcaaagttgcctccacgccagccacactagagtgtccaccaaaacaggaagaagccgccggcggacttccattcagacacgcctggggacttgaggtgctcatcgagggagatgccgaagagagatgacggagacactgagaagaaaccgccgtccgaactaaacggatcggaagttgaacttggatgggcaagg

SEQ ID NO: 3392 - DNA, 200 bp, Digitaria sanguinalis
ccttgcccatccaagttcaacttccgatccgtttagttcggacggcggtttcttctcagtgtctccgtcatctctcttcggcatctccctcgatgagcacctcaagtccccaggcgtgtctgaatggaagtccgccggcggcttcttcctgttttggtggacactctagtgtggctggcgtggaggcaactttgcccttt

SEQ ID NO: 3393 - DNA, 200 bp, Digitaria sanguinalis
ggaagttgaacttggatgggcaagggtagggctatagggttggatccattcgggtcacccataacaaagtaattaaaaaataattatttaattagatgggttgctttaagactcgtctcctaaaataaaagtggagtatcggattagttctctattataattagtagcaaattaaatatatatgtgcattgctgcaggct

SEQ ID NO: 3394 - DNA, 200 bp, Digitaria sanguinalis
agcctgcagcaatgcacatatatatttaatttgctactaattataatagagaactaatccgatactccacttttattttaggagacgagtcttaaagcaacccatctaattaaataattattttttaattactttgttatgggtgacccgaatggatccaaccctatagccctacccttgcccatccaagttcaacttcc

SEQ ID NO: 3395 - DNA, 200 bp, Digitaria sanguinalis
atatatatgtgcattgctgcaggctaaagaaatgtatcactactacacaacccctttcgcagccggttttgccaaccgtttgattccaccaaccggctatgattagggtacccaggattttagttccacatccaaacaattgaaaaaaatttactacccgagcaacatcaacctatggcgaagtgttattaatcattccc

SEQ ID NO: 3396 - DNA, 200 bp, Digitaria sanguinalis
gggaatgattaataacacttcgccataggttgatgttgctcgggtagtaaatttttttcaattgtttggatgtggaactaaaatcctgggtaccctaatcatagccggttggtggaatcaaacggttggcaaaaccggctgcgaaaggggttgtgtagtagtgatacatttctttagcctgcagcaatgcacatatatat

SEQ ID NO: 3397 - DNA, 200 bp, Digitaria sanguinalis
tggcgaagtgttattaatcattcccctagtaagttattattaacagtttttattgcacttccattgacatgcctggacaaattttcctttttaatttgtagggttattaagcatcacacactatcagtttttgttggtgatcaaagtaggatgatcaatcgaattgctgtggtttttggtagaagaggatataacatcga

SEQ ID NO: 3398 - DNA, 200 bp, Digitaria sanguinalis
tcgatgttatatcctcttctaccaaaaaccacagcaattcgattgatcatcctactttgatcaccaacaaaaactgatagtgtgtgatgcttaataaccctacaaattaaaaaggaaaatttgtccaggcatgtcaatggaagtgcaataaaaactgttaataataacttactaggggaatgattaataacacttcgcca

SEQ ID NO: 3399 - DNA, 200 bp, Digitaria sanguinalis
ttggtagaagaggatataacatcgagccattggctgttgggctaaactaggataaagtattatttacaaaagtagtgtcaggaatagacaaattattgaaccaagttgtagagcaactaaacaaacttgttattgttataaaggtccgtatttttccctctaacatgtgacttacaaaaatgattagtacgtcacagaag

SEQ ID NO: 3400 - DNA, 200 bp, Digitaria sanguinalis
cttctgtgacgtactaatcatttttgtaagtcacatgttagagggaaaaatacggacctttataacaataacaagtttgtttagttgctctacaacttggttcaataatttgtctattcctgacactacttttgtaaataatactttatcctagtttagcccaacagccaatggctcgatgttatatcctcttctaccaa

SEQ ID NO: 3401 - DNA, 200 bp, Digitaria sanguinalis
aaaaatgattagtacgtcacagaagtcatcactctgtcttgtcctgagtctgttcaacatggtatctgatattcacatgttaacatttggattgataagcaggttgttgttatgttcggcaagatgtatcagaggaagaagtgtggctgaggaagaacgattgacaaaaacgtgaagcactgcccgtcaaccgacaacgt

SEQ ID NO: 3402 - DNA, 200 bp, Digitaria sanguinalis
acgttgtcggttgacgggcagtgcttcacgtttttgtcaatcgttcttcctcagccacacttcttcctctgatacatcttgccgaacataacaacaacctgcttatcaatccaaatgttaacatgtgaatatcagataccatgttgaacagactcaggacaagacagagtgatgacttctgtgacgtactaatcattttt

SEQ ID NO: 3403 - DNA, 200 bp, Digitaria sanguinalis
agcactgcccgtcaaccgacaacgtacggcgacatatgctacagtaggtgcgacaacggcgagacacgctatagtaggcaggtgcgcaactactgtaggccaacgctcccacgatgtggagtagttcagattacttttcctatactttagtagtaattgccagtattgtaatttggatatatgtctctgttcggaattgg

SEQ ID NO: 3404 - DNA, 200 bp, Digitaria sanguinalis
ccaattccgaacagagacatatatccaaattacaatactggcaattactactaaagtataggaaaagtaatctgaactactccacatcgtgggagcgttggcctacagtagttgcgcacctgcctactatagcgtgtctcgccgttgtcgcacctactgtagcatatgtcgccgtacgttgtcggttgacgggcagtgct

SEQ ID NO: 3405 - DNA, 200 bp, Digitaria sanguinalis
gatatatgtctctgttcggaattggaaagagttatgtttagagatcaatatgatctctagacgtcctgagctgctgtttcttcgtctcactcttgctcccaccggccgttaggacggcgtctcgtcctcgccgccggcgtgaaccctcacctcgcctgccaacttcctattcatacgcactccaagggattagcattgcc

SEQ ID NO: 3406 - DNA, 200 bp, Digitaria sanguinalis
ggcaatgctaatcccttggagtgcgtatgaataggaagttggcaggcgaggtgagggttcacgccggcggcgaggacgagacgccgtcctaacggccggtgggagcaagagtgagacgaagaaacagcagctcaggacgtctagagatcatattgatctctaaacataactctttccaattccgaacagagacatatatc

SEQ ID NO: 3407 - DNA, 200 bp, Digitaria sanguinalis
cgcactccaagggattagcattgccaacaatttggtatcagcaagcagctgtgtccagggattgacgactgggaattccatccacaccgccgccatgtcctccactcccgtgtccaccacagcaccgccgccttccactaccgcaccaccactctcatccaccaacctcgccaccactactgttccagtcgccaccatcg

SEQ ID NO: 3408 - DNA, 200 bp, Digitaria sanguinalis
cgatggtggcgactggaacagtagtggtggcgaggttggtggatgagagtggtggtgcggtagtggaaggcggcggtgctgtggtggacacgggagtggaggacatggcggcggtgtggatggaattcccagtcgtcaatccctggacacagctgcttgctgataccaaattgttggcaatgctaatcccttggagtgcg

SEQ ID NO: 3409 - DNA, 200 bp, Digitaria sanguinalis
actactgttccagtcgccaccatcgacaccctaacgacggcgatctacagcttgcaacgtcaaataggagaattcgccaaccgtctctctatggttgaacatcgtcctcatccaccggaggccggaccatcggcatcactgccacatgggttgccgggctatgacggcatcccacatcatcatccataatcgtccatacc

SEQ ID NO: 3410 - DNA, 200 bp, Digitaria sanguinalis
ggtatggacgattatggatgatgatgtgggatgccgtcatagcccggcaacccatgtggcagtgatgccgatggtccggcctccggtggatgaggacgatgttcaaccatagagagacggttggcgaattctcctatttgacgttgcaagctgtagatcgccgtcgttagggtgtcgatggtggcgactggaacagtagt

SEQ ID NO: 3411 - DNA, 200 bp, Digitaria sanguinalis
atcatcatccataatcgtccatacctccacaaccatcgaactggttcccatcactcagattgccttttcaccctccccttcaccacttactccactgcatgagagattctacatgatggaaagagatgcaggtggcaaatgaagcattattgcaaaaatataatgatgtcaatattctagtaatgattaatgaaactctt

SEQ ID NO: 3412 - DNA, 200 bp, Digitaria sanguinalis
aagagtttcattaatcattactagaatattgacatcattatatttttgcaataatgcttcatttgccacctgcatctctttccatcatgtagaatctctcatgcagtggagtaagtggtgaaggggagggtgaaaaggcaatctgagtgatgggaaccagttcgatggttgtggaggtatggacgattatggatgatgat

SEQ ID NO: 3413 - DNA, 200 bp, Digitaria sanguinalis
tctagtaatgattaatgaaactcttattgcaatgggaatcttgatgatacagtttttccaccaccaaagatacatgtcatgctttattaatactccttattgtggccatgcacttcatcaggaccttagctcgatgaagggcgctgtgtgcagtgtgtcttcaaatttagcagtgcatttacgtcgtatacactcctctc

SEQ ID NO: 3414 - DNA, 200 bp, Digitaria sanguinalis
gagaggagtgtatacgacgtaaatgcactgctaaatttgaagacacactgcacacagcgcccttcatcgagctaaggtcctgatgaagtgcatggccacaataaggagtattaataaagcatgacatgtatctttggtggtggaaaaactgtatcatcaagattcccattgcaataagagtttcattaatcattactaga

SEQ ID NO: 3415 - DNA, 200 bp, Digitaria sanguinalis
catttacgtcgtatacactcctctctgctgctgtaagtagttcgacaaggcactgcatcgttccctcgccgccggactgcaatgtcctcactgaccggcaacagctatcatcataggttgggagtatacgggagggatttgagcgtaggatgaagcggttacagacattacggacaataaagtttttctgtctctctgta

SEQ ID NO: 3416 - DNA, 200 bp, Digitaria sanguinalis
tacagagagacagaaaaactttattgtccgtaatgtctgtaaccgcttcatcctacgctcaaatccctcccgtatactcccaacctatgatgatagctgttgccggtcagtgaggacattgcagtccggcggcgagggaacgatgcagtgccttgtcgaactacttacagcagcagagaggagtgtatacgacgtaaatg

SEQ ID NO: 3417 - DNA, 200 bp, Digitaria sanguinalis
aataaagtttttctgtctctctgtacatggttgtggcttgtgacaaaaccaacatccaccactcacaggaacaagagaaactgtagcaaacactagtaggaggagaatagctgctgctttcccagttgacatcttaatgcccaatgttatgtctactagatattgctaagaaaatgttatgactagatattgacctcctg

SEQ ID NO: 3418 - DNA, 200 bp, Digitaria sanguinalis
caggaggtcaatatctagtcataacattttcttagcaatatctagtagacataacattgggcattaagatgtcaactgggaaagcagcagctattctcctcctactagtgtttgctacagtttctcttgttcctgtgagtggtggatgttggttttgtcacaagccacaaccatgtacagagagacagaaaaactttatt

SEQ ID NO: 3419 - DNA, 200 bp, Digitaria sanguinalis
gttatgactagatattgacctcctgcgttcatacgtgctcctatatataggaggcaaagcatgcaggttggtatacaccgggtttaatgcgcttttatccttgataccatattacgtgatctagatatggtatcatttatgaagcgatccttagagatattaatgcctattgtagagttccatgttatcctcttgtattc

SEQ ID NO: 3420 - DNA, 200 bp, Digitaria sanguinalis
gaatacaagaggataacatggaactctacaataggcattaatatctctaaggatcgcttcataaatgataccatatctagatcacgtaatatggtatcaaggataaaagcgcattaaacccggtgtataccaacctgcatgctttgcctcctatatataggagcacgtatgaacgcaggaggtcaatatctagtcataac

SEQ ID NO: 3421 - DNA, 200 bp, Digitaria sanguinalis
agttccatgttatcctcttgtattcatattttatgaccataaaataactagaattatttgaatatctcatcaggataaataatcagtttattaattcatgccttacctttgttttgtaaccacagcaggtcccgtctcccggattgtcttcttttgcatgcacgcatgcattcagggccgctgacacctcgaacgtttcc

SEQ ID NO: 3422 - DNA, 200 bp, Digitaria sanguinalis
ggaaacgttcgaggtgtcagcggccctgaatgcatgcgtgcatgcaaaagaagacaatccgggagacgggacctgctgtggttacaaaacaaaggtaaggcatgaattaataaactgattatttatcctgatgagatattcaaataattctagttattttatggtcataaaatatgaatacaagaggataacatggaact

SEQ ID NO: 3423 - DNA, 200 bp, Digitaria sanguinalis
ggccgctgacacctcgaacgtttccatccgtatatgcatgccatcgcccgggcgaccatgtaactcagctctgcgccgaccaatcagtgcacctgcctcttgacagcctcgccgccgacgagccgccgtgcgcgcgaaggtcgccgcgctctcgcagtacgtcgccacgccaacaagttcaagaaggacgggaccggcgg

SEQ ID NO: 3424 - DNA, 200 bp, Digitaria sanguinalis
ccgccggtcccgtccttcttgaacttgttggcgtggcgacgtactgcgagagcgcggcgaccttcgcgcgcacggcggctcgtcggcggcgaggctgtcaagaggcaggtgcactgattggtcggcgcagagctgagttacatggtcgcccgggcgatggcatgcatatacggatggaaacgttcgaggtgtcagcggcc

SEQ ID NO: 3425 - DNA, 200 bp, Digitaria sanguinalis
agttcaagaaggacgggaccggcggcggcggctacaccaccgccaccgtcggtacgtacggacggtagccacgtcagcacatccatctgcttgatcatgcacaaaacctgcatatacctataatttggaaggtgctaaaataatacaattatgtgtgcagaagagtggatttaaatcttcaagcaacatgcaacaaatgt

SEQ ID NO: 3426 - DNA, 200 bp, Digitaria sanguinalis
acatttgttgcatgttgcttgaagatttaaatccactcttctgcacacataattgtattattttagcaccttccaaattataggtatatgcaggttttgtgcatgatcaagcagatggatgtgctgacgtggctaccgtccgtacgtaccgacggtggcggtggtgtagccgccgccgccggtcccgtccttcttgaact

SEQ ID NO: 3427 - DNA, 200 bp, Digitaria sanguinalis
tcttcaagcaacatgcaacaaatgtgagaaagaagagtgcttttaaatcttcaatcaacatgcgacaaattttacccttatgaaagctgcgggagtacccgccgagtgcagccgtccacgacagtgaaaaaaaaagttaccgccggatctgagcctaacagccggtaattctgtctccttttgttgatgcaacccgttga

SEQ ID NO: 3428 - DNA, 200 bp, Digitaria sanguinalis
tcaacgggttgcatcaacaaaaggagacagaattaccggctgttaggctcagatccggcggtaactttttttttcactgtcgtggacggctgcactcggcgggtactcccgcagctttcataagggtaaaatttgtcgcatgttgattgaagatttaaaagcactcttctttctcacatttgttgcatgttgcttgaaga

SEQ ID NO: 3429 - DNA, 200 bp, Digitaria sanguinalis
tccttttgttgatgcaacccgttgaagccccacccgtcggtgcaccgattagattccaccgctactcttcaacttttcattattcatcaaactttccattattcatccactcacacctatcacgatctatagtgttttctctcatctacagtgtattttcacccagtctaaacacacccttgaaaacacacccggtgtgg

SEQ ID NO: 3430 - DNA, 200 bp, Digitaria sanguinalis
ccacaccgggtgtgttttcaagggtgtgtttagactgggtgaaaatacactgtagatgagagaaaacactatagatcgtgataggtgtgagtggatgaataatggaaagtttgatgaataatgaaaagttgaagagtagcggtggaatctaatcggtgcaccgacgggtggggcttcaacgggttgcatcaacaaaagga

SEQ ID NO: 3431 - DNA, 200 bp, Digitaria sanguinalis
acccttgaaaacacacccggtgtggcctctccccattcacccagaagtgttaaacacacccttgaaaacacacccggtgtggcctctccccgttcacacagaagtgtcccgaactgccacggggagccactggcgtgggcggtaaaaaaagagaaaaaaatctacccctcctttttttgccttcctcgccacctcggccg

SEQ ID NO: 3432 - DNA, 200 bp, Digitaria sanguinalis
cggccgaggtggcgaggaaggcaaaaaaaggaggggtagatttttttctctttttttaccgcccacgccagtggctccccgtggcagttcgggacacttctgtgtgaacggggagaggccacaccgggtgtgttttcaagggtgtgtttaacacttctgggtgaatggggagaggccacaccgggtgtgttttcaagggt

SEQ ID NO: 3433 - DNA, 200 bp, Digitaria sanguinalis
gtatctacccgagattccgtcaagagaagtatcaatggtgacactagcacatcatcaggggtgtgtaaacttccatttattaagattaagcataagatcatatcgttcttgccagaataagttcggtatagttcacttcaatccatttttgcatgagtaaatttacaatgcagcacacttcggttccacccatcatagcc

SEQ ID NO: 3434 - DNA, 200 bp, Digitaria sanguinalis
ggctatgatgggtggaaccgaagtgtgctgcattgtaaatttactcatgcaaaaatggattgaagtgaactataccgaacttattctggcaagaacgatatgatcttatgcttaatcttaataaatggaagtttacacacccctgatgatgtgctagtgtcaccattgatacttctcttgacggaatctcgggtagatac

SEQ ID NO: 3435 - DNA, 200 bp, Digitaria sanguinalis
cacttcggttccacccatcatagccattttgcttataaagattgatgaaatgctttcttagtctaaagggggatgtttatccagtggagccatacgatgactttatggtgcatcaagtacttgatgcgcattggggtgtcctcaatgatgaagatgtaagcattcttttatccgttcccaaatctttcgagcttcctgct

SEQ ID NO: 3436 - DNA, 200 bp, Digitaria sanguinalis
agcaggaagctcgaaagatttgggaacggataaaagaatgcttacatcttcatcattgaggacaccccaatgcgcatcaagtacttgatgcaccataaagtcatcgtatggctccactggataaacatccccctttagactaagaaagcatttcatcaatctttataagcaaaatggctatgatgggtggaaccgaagtg

SEQ ID NO: 3437 - DNA, 200 bp, Digitaria sanguinalis
gtgcttgccccccgtcgtcccgcgccagctgcgccgtcgccgcggcggcgtcgtcttcgggcgctggaggcggcgaggcggcctccgcggtcacggcggtcgcccccgcggccgccggcagggacaagtaagcgctctccctccccaccccgccgaaagtgtggcgtcgttttttataatttctcgcggggcgaggtggt

SEQ ID NO: 3438 - DNA, 200 bp, Digitaria sanguinalis
accacctcgccccgcgagaaattataaaaaacgacgccacactttcggcggggtggggagggagagcgcttacttgtccctgccggcggccgcgggggcgaccgccgtgaccgcggaggccgcctcgccgcctccagcgcccgaagacgacgccgccgcggcgacggcgcagctggcgcgggacgacggggggcaagcac

SEQ ID NO: 3439 - DNA, 200 bp, Digitaria sanguinalis
ataatttctcgcggggcgaggtggtggcgcggttactgttcgtggaccctcactccgcttttttcccaaatattttgtttttccctcctcatgacggggctggtcgggcttctggcggcaaatgcagggtgcggcgccacacgatttcggtgttcgtcggggacgagagcggcatgatcaaccggatcgccggggtcttc

SEQ ID NO: 3440 - DNA, 200 bp, Digitaria sanguinalis
gaagaccccggcgatccggttgatcatgccgctctcgtccccgacgaacaccgaaatcgtgtggcgccgcaccctgcatttgccgccagaagcccgaccagccccgtcatgaggagggaaaaacaaaatatttgggaaaaaagcggagtgagggtccacgaacagtaaccgcgccaccacctcgccccgcgagaaattat

SEQ ID NO: 3441 - DNA, 200 bp, Digitaria sanguinalis
gatcaaccggatcgccggggtcttcgccaggagagggtacaacattgagtccctcgccgtgggtctcaacaaggacaaggccctcttcaccattgtcgtctccgggactgataaagtgctcaaccaagtcatcgaacagctcaataagcttgtcaatgtccacagcgtgagttggccacactaaaatttcagcaaagtcg

SEQ ID NO: 3442 - DNA, 200 bp, Digitaria sanguinalis
cgactttgctgaaattttagtgtggccaactcacgctgtggacattgacaagcttattgagctgttcgatgacttggttgagcactttatcagtcccggagacgacaatggtgaagagggccttgtccttgttgagacccacggcgagggactcaatgttgtaccctctcctggcgaagaccccggcgatccggttgatc

SEQ ID NO: 3443 - DNA, 200 bp, Digitaria sanguinalis
ccacactaaaatttcagcaaagtcgtgtgaattcgtacttgattacttgaatttcccctttaaattggtagctggtggcatttcactaatgcattgagatttttgttttatgtgttttaccttgctgaatgcccttcccccttttagtctgttaagataatttccacttttgtggagcatcttttgtatatatagagtag

SEQ ID NO: 3444 - DNA, 200 bp, Digitaria sanguinalis
ctactctatatatacaaaagatgctccacaaaagtggaaattatcttaacagactaaaagggggaagggcattcagcaaggtaaaacacataaaacaaaaatctcaatgcattagtgaaatgccaccagctaccaatttaaaggggaaattcaagtaatcaagtacgaattcacacgactttgctgaaattttagtgtgg

SEQ ID NO: 3445 - DNA, 200 bp, Digitaria sanguinalis
agcatcttttgtatatatagagtagtacacaaaaccttttgcttttctgattcgtccataatccttgttttcttttttggtattctgttgcttttccccatagaatcactgcttgacagtcatgtcaacatcagggacatacttctttctaggtgatacctcaaatgtgtgttgatactatatatgcactgtcatacact

SEQ ID NO: 3446 - DNA, 200 bp, Digitaria sanguinalis
agtgtatgacagtgcatatatagtatcaacacacatttgaggtatcacctagaaagaagtatgtccctgatgttgacatgactgtcaagcagtgattctatggggaaaagcaacagaataccaaaaaagaaaacaaggattatggacgaatcagaaaagcaaaaggttttgtgtactactctatatatacaaaagatgct

SEQ ID NO: 3447 - DNA, 200 bp, Digitaria sanguinalis
tactatatatgcactgtcatacactttctttgggtgcacatacactcctttgtcttttctaggtgacgcctcaaatgtgcatgttattattctggctgtgtaatgcctcagaactcaacagtgacattgtcgtatcatgtttccttggttaatcatcgccaaaaaatgactttgttattttgaccatacagtagctaatt

SEQ ID NO: 3448 - DNA, 200 bp, Digitaria sanguinalis
aattagctactgtatggtcaaaataacaaagtcattttttggcgatgattaaccaaggaaacatgatacgacaatgtcactgttgagttctgaggcattacacagccagaataataacatgcacatttgaggcgtcacctagaaaagacaaaggagtgtatgtgcacccaaagaaagtgtatgacagtgcatatatagta

SEQ ID NO: 3449 - DNA, 200 bp, Digitaria sanguinalis
tattttgaccatacagtagctaattagctctaatgctatcctgttgaaaagtctatctataaatatagagcacccttttggttacaagtgggatgtttctgaattttcttgtctctttgcagtgttgatctcttagggaaaagtctctgaaaaaaatactatgcagatattaaatagcttaggtaaatgtgcttcatgga

SEQ ID NO: 3450 - DNA, 200 bp, Digitaria sanguinalis
tccatgaagcacatttacctaagctatttaatatctgcatagtatttttttcagagacttttccctaagagatcaacactgcaaagagacaagaaaattcagaaacatcccacttgtaaccaaaagggtgctctatatttatagatagacttttcaacaggatagcattagagctaattagctactgtatggtcaaaata

SEQ ID NO: 3451 - DNA, 200 bp, Digitaria sanguinalis
agcttaggtaaatgtgcttcatggatcatcattactgcactgtttgtctcaagtctcaactctcaactaccgtttagatgggctttaatatttgtactattttatttttcaaaaaatatttactactattgatatgttgcaataagagtaataccagtaaatatttattattttttgtgtcgacccaattaattacaggt

SEQ ID NO: 3452 - DNA, 200 bp, Digitaria sanguinalis
acctgtaattaattgggtcgacacaaaaaataataaatatttactggtattactcttattgcaacatatcaatagtagtaaatattttttgaaaaataaaatagtacaaatattaaagcccatctaaacggtagttgagagttgagacttgagacaaacagtgcagtaatgatgatccatgaagcacatttacctaagct

SEQ ID NO: 3453 - DNA, 200 bp, Digitaria sanguinalis
tgtgtcgacccaattaattacaggtcgaagatctatctaaagaacctcaggttgaaagagagctgatgcttataaaattaaacgttgaacctgatcaacggcctgaggtatgttatggtgttcactaagtgtttgtaatccaaaagttgaatagcatcctgtatttatgatactaaattacatggtgagtcttactgcag

SEQ ID NO: 3454 - DNA, 200 bp, Digitaria sanguinalis
ctgcagtaagactcaccatgtaatttagtatcataaatacaggatgctattcaacttttggattacaaacacttagtgaacaccataacatacctcaggccgttgatcaggttcaacgtttaattttataagcatcagctctctttcaacctgaggttctttagatagatcttcgacctgtaattaattgggtcgacaca

SEQ ID NO: 3455 - DNA, 200 bp, Digitaria sanguinalis
aattacatggtgagtcttactgcagtgcttcttttcatgactgacaggtcatggttttagttgatattttcagagcaaaagttgttgatatatctgataacacacttacaattgaggtaaaaaaaactcaaatctctaactggtgcacatatgttaattggtatcacttttcatgcgatgaactatgtgtttgatggtta

SEQ ID NO: 3456 - DNA, 200 bp, Digitaria sanguinalis
taaccatcaaacacatagttcatcgcatgaaaagtgataccaattaacatatgtgcaccagttagagatttgagttttttttacctcaattgtaagtgtgttatcagatatatcaacaacttttgctctgaaaatatcaactaaaaccatgacctgtcagtcatgaaaagaagcactgcagtaagactcaccatgtaatt

SEQ ID NO: 3457 - DNA, 200 bp, Digitaria sanguinalis
cgatgaactatgtgtttgatggttatttgaccactgttaggtagccggagatcctggaaaaattgctgcagtccagaggaacctaaggaaatttggaatcaaagaaatttgccgaacgggaaaggtaatttctgaatattctttccttacatggatatgaatattttttcgtagtactaatttttaatgctccaccttct

SEQ ID NO: 3458 - DNA, 200 bp, Digitaria sanguinalis
agaaggtggagcattaaaaattagtactacgaaaaaatattcatatccatgtaaggaaagaatattcagaaattacctttcccgttcggcaaatttctttgattccaaatttccttaggttcctctggactgcagcaatttttccaggatctccggctacctaacagtggtcaaataaccatcaaacacatagttcatcg

SEQ ID NO: 3459 - DNA, 200 bp, Digitaria sanguinalis
actaatttttaatgctccaccttcttagattgctttgagacgtgaaaagattggtgcaactgcacgtttctggcgattttctgctgcttcttatccggaccttattgaggcactgcctaaacaaccacttacatctgtaaatgggagagttaatggcagtttcgagcaaccatccaatgctggggtatgttccctttgcc

SEQ ID NO: 3460 - DNA, 200 bp, Digitaria sanguinalis
ggcaaagggaacataccccagcattggatggttgctcgaaactgccattaactctcccatttacagatgtaagtggttgtttaggcagtgcctcaataaggtccggataagaagcagcagaaaatcgccagaaacgtgcagttgcaccaatcttttcacgtctcaaagcaatctaagaaggtggagcattaaaaattagt

SEQ ID NO: 3461 - DNA, 200 bp, Digitaria sanguinalis
aatgctggggtatgttccctttgccttttccctttttattatgacctgctctgtttataattcacaacacttagttatggtgagaggatgcttctttatttcttgaacgatgcatataagcaatttgaggtggataaattaaataaaaacctgtaatgtcagtaataccttttcagctaaccaaatgtagttaatacctt

SEQ ID NO: 3462 - DNA, 200 bp, Digitaria sanguinalis
aaggtattaactacatttggttagctgaaaaggtattactgacattacaggtttttatttaatttatccacctcaaattgcttatatgcatcgttcaagaaataaagaagcatcctctcaccataactaagtgttgtgaattataaacagagcaggtcataataaaaagggaaaaggcaaagggaacataccccagcatt

SEQ ID NO: 3463 - DNA, 200 bp, Digitaria sanguinalis
gctaaccaaatgtagttaataccttttcagctaaccaaatgtagttgaacttctatgttaagataaaagtgccaataattacctattgtgtttaagcaattatctgcaatgatgcagggatattagttcactaaacctaatgtgtttgaaaaataattaacttgtcttgtgaggggtttgggtcacttcaccaaacattt

SEQ ID NO: 3464 - DNA, 200 bp, Digitaria sanguinalis
aaatgtttggtgaagtgacccaaacccctcacaagacaagttaattatttttcaaacacattaggtttagtgaactaatatccctgcatcattgcagataattgcttaaacacaataggtaattattggcacttttatcttaacatagaagttcaactacatttggttagctgaaaaggtattaactacatttggttagc

SEQ ID NO: 3465 - DNA, 200 bp, Digitaria sanguinalis
gtttgggtcacttcaccaaacatttttgccagtgcatgatactacttttagaagtcagagtgcactataacagtgcttttatgagttataaagcagtaattgaaggtacatatttcatatttgcatgcataaacagctctcctaatggacgagtcattacacaactggtatgtcaaacttgtgcatatcttctattatgc

SEQ ID NO: 3466 - DNA, 200 bp, Digitaria sanguinalis
gcataatagaagatatgcacaagtttgacataccagttgtgtaatgactcgtccattaggagagctgtttatgcatgcaaatatgaaatatgtaccttcaattactgctttataactcataaaagcactgttatagtgcactctgacttctaaaagtagtatcatgcactggcaaaaatgtttggtgaagtgacccaaac

SEQ ID NO: 3467 - DNA, 200 bp, Digitaria sanguinalis
aacttgtgcatatcttctattatgctaatgagggaacatattgttgggtgttgcccaccatagtgcacaaacttacataaacagcattcctaatgggtgaatcatgcagtcctagccatatttcacacttgccgtgaaacttggactaatgctaaattgctaatatcattaatgaaattgtgcagccattgaatttgtgt

SEQ ID NO: 3468 - DNA, 200 bp, Digitaria sanguinalis
acacaaattcaatggctgcacaatttcattaatgatattagcaatttagcattagtccaagtttcacggcaagtgtgaaatatggctaggactgcatgattcacccattaggaatgctgtttatgtaagtttgtgcactatggtgggcaacacccaacaatatgttccctcattagcataatagaagatatgcacaagtt

SEQ ID NO: 3469 - DNA, 200 bp, Digitaria sanguinalis
aattgtgcagccattgaatttgtgtgatgcagtattacaatctagagacttctataacatgtgatgttttgacctttgaactgttcagggtgatgtttatcctgtggaaccttatgagagctcatcactgaaccaagtacttgatgcccattggggtgttcttgatgatgatgatgtaagtttatagatttccatcgtgg

SEQ ID NO: 3470 - DNA, 200 bp, Digitaria sanguinalis
ccacgatggaaatctataaacttacatcatcatcatcaagaacaccccaatgggcatcaagtacttggttcagtgatgagctctcataaggttccacaggataaacatcaccctgaacagttcaaaggtcaaaacatcacatgttatagaagtctctagattgtaatactgcatcacacaaattcaatggctgcacaatt

SEQ ID NO: 3471 - DNA, 200 bp, Digitaria sanguinalis
gtaagtttatagatttccatcgtgggattgtggttagtgctatatggactgtattgttgtaagcataattgcaccctgaatctaattctaatgtgactggagtgagttctcatttaatactttcataatgtttgcaagaagtcaattgtaggccgcctatataactttaagcaatggtactgcctaatctgcatggtact

SEQ ID NO: 3472 - DNA, 200 bp, Digitaria sanguinalis
agtaccatgcagattaggcagtaccattgcttaaagttatataggcggcctacaattgacttcttgcaaacattatgaaagtattaaatgagaactcactccagtcacattagaattagattcagggtgcaattatgcttacaacaatacagtccatatagcactaaccacaatcccacgatggaaatctataaacttac

SEQ ID NO: 3473 - DNA, 200 bp, Digitaria sanguinalis
ggtactgcctaatctgcatggtactaaactggtactgattttgtttgttacagtcaactggactacgctcacataccctctccatccttgtgaacgattgtcctggtgtcctcaacattgtcacaggggtctttgctcgcaggggctacaatatacaggttttccttattgaaaaactatctttcttcttgtgaaatata

SEQ ID NO: 3474 - DNA, 200 bp, Digitaria sanguinalis
tatatttcacaagaagaaagatagtttttcaataaggaaaacctgtatattgtagcccctgcgagcaaagacccctgtgacaatgttgaggacaccaggacaatcgttcacaaggatggagagggtatgtgagcgtagtccagttgactgtaacaaacaaaatcagtaccagtttagtaccatgcagattaggcagtacc

SEQ ID NO: 3475 - DNA, 200 bp, Digitaria sanguinalis
actatctttcttcttgtgaaatatagtgcctgggtagttattaatgacagttacttctcatcagagccttgctgttggcccagctgagaaggaaggcatttcacgcattacaactgttgttcctggtactgatgaatccattgagaagttagttcagcagctttacaagcttattgatgtgcatgaggtaagcagcatgt

SEQ ID NO: 3476 - DNA, 200 bp, Digitaria sanguinalis
acatgctgcttacctcatgcacatcaataagcttgtaaagctgctgaactaacttctcaatggattcatcagtaccaggaacaacagttgtaatgcgtgaaatgccttccttctcagctgggccaacagcaaggctctgatgagaagtaactgtcattaataactacccaggcactatatttcacaagaagaaagatagt

SEQ ID NO: 3477 - DNA, 200 bp, Digitaria sanguinalis
gatgtgcatgaggtaagcagcatgtgactttatgaaactcattttttattgcaattttattatttaacataagcatctaaattgtgcaggttcatgacatcactcactcacctttttctgaaagggagctgatgcttattaaggtttctgtaaacactgctgctcggagggaaatcctagatattgctgaaatcttccga

SEQ ID NO: 3478 - DNA, 200 bp, Digitaria sanguinalis
tcggaagatttcagcaatatctaggatttccctccgagcagcagtgtttacagaaaccttaataagcatcagctccctttcagaaaaaggtgagtgagtgatgtcatgaacctgcacaatttagatgcttatgttaaataataaaattgcaataaaaaatgagtttcataaagtcacatgctgcttacctcatgcacatc

SEQ ID NO: 3479 - DNA, 200 bp, Digitaria sanguinalis
cctagatattgctgaaatcttccgagcaaaacctgttgatgtttctgaccacacagttacactacaggttagcttcctaacaattttgtctctcctggatttacttcagtgtctgtccgaacactgatcatagcagagccagttgtgatacaagttttgtgcacaatcaaaaaattagatcatggtgttcttttactttt

SEQ ID NO: 3480 - DNA, 200 bp, Digitaria sanguinalis
aaaagtaaaagaacaccatgatctaattttttgattgtgcacaaaacttgtatcacaactggctctgctatgatcagtgttcggacagacactgaagtaaatccaggagagacaaaattgttaggaagctaacctgtagtgtaactgtgtggtcagaaacatcaacaggttttgctcggaagatttcagcaatatctagg

SEQ ID NO: 3481 - DNA, 200 bp, Digitaria sanguinalis
tagatcatggtgttcttttacttttttcagcatagcactcttgtagtaacagtaacattaccatataaaaacactgtgatgccaatgacattactattcttcaccctgctttatctcactccttccaagctattggcgtattgcaaaactcttacataatggagttcttattggtaatttgcagctcactggtgatctta

SEQ ID NO: 3482 - DNA, 200 bp, Digitaria sanguinalis
taagatcaccagtgagctgcaaattaccaataagaactccattatgtaagagttttgcaatacgccaatagcttggaaggagtgagataaagcagggtgaagaatagtaatgtcattggcatcacagtgtttttatatggtaatgttactgttactacaagagtgctatgctgaaaaaagtaaaagaacaccatgatcta

SEQ ID NO: 3483 - DNA, 200 bp, Digitaria sanguinalis
aatttgcagctcactggtgatcttaacaagatggttgcattgcaacggttattggagccttatggcatctgtgaagtatgtgtgcttcttatacagtcactgtctgttactttattgtttttcttatgtagttattatgaaacagacattcctttcacagtttcactaactagttgtgaaacataatctaactactgtaa

SEQ ID NO: 3484 - DNA, 200 bp, Digitaria sanguinalis
ttacagtagttagattatgtttcacaactagttagtgaaactgtgaaaggaatgtctgtttcataataactacataagaaaaacaataaagtaacagacagtgactgtataagaagcacacatacttcacagatgccataaggctccaataaccgttgcaatgcaaccatcttgttaagatcaccagtgagctgcaaatt

SEQ ID NO: 3485 - DNA, 200 bp, Digitaria sanguinalis
gtgaaacataatctaactactgtaataatgtcgatcaaagcattatgcacaacattgcacatggctagcccttaggccttagcagttagagaaaaaggaaaatcttgtagcagctactaaaggattcccaatcagttgcacacctgttttatctttaggcctcctccaatggaccgactcttagctagctcataaatatt

SEQ ID NO: 3486 - DNA, 200 bp, Digitaria sanguinalis
aatatttatgagctagctaagagtcggtccattggaggaggcctaaagataaaacaggtgtgcaactgattgggaatcctttagtagctgctacaagattttcctttttctctaactgctaaggcctaagggctagccatgtgcaatgttgtgcataatgctttgatcgacattattacagtagttagattatgtttcac

SEQ ID NO: 3487 - DNA, 200 bp, Digitaria sanguinalis
gactcttagctagctcataaatattttattcgatgaacaatgctcgctagctcttagttaagagatcagctcttagcccaaccccctcacatgcatgtttttccaagctcttgttctactgtgtcgagctctaagagctagctagttggctcttgccattaaaggaggccttggattgatacatttgctttccttttctc

SEQ ID NO: 3488 - DNA, 200 bp, Digitaria sanguinalis
gagaaaaggaaagcaaatgtatcaatccaaggcctcctttaatggcaagagccaactagctagctcttagagctcgacacagtagaacaagagcttggaaaaacatgcatgtgagggggttgggctaagagctgatctcttaactaagagctagcgagcattgttcatcgaataaaatatttatgagctagctaagagtc

SEQ ID NO: 3489 - DNA, 200 bp, Digitaria sanguinalis
ttgatacatttgctttccttttctctgcaaagcaattgctctttcctcaccgttgtgttgcactcatgacaggttgccagaacaggtcgtgtggctctggtccgcgaatccggagtggattccacgtacctccggggctaccccctcccattgtagcctggcgtttgtgatgatggcccaggaaaggcgtgcctggttgc

SEQ ID NO: 3490 - DNA, 200 bp, Digitaria sanguinalis
gcaaccaggcacgcctttcctgggccatcatcacaaacgccaggctacaatgggagggggtagccccggaggtacgtggaatccactccggattcgcggaccagagccacacgacctgttctggcaacctgtcatgagtgcaacacaacggtgaggaaagagcaattgctttgcagagaaaaggaaagcaaatgtatcaa

SEQ ID NO: 3491 - DNA, 200 bp, Digitaria sanguinalis
gcccaggaaaggcgtgcctggttgctagagcagaatgtgtaggcgtcccttgttcggttgtgtgtatttgctggacttgtttgtttcatgttcgtcgactccttgattcgcttgcttaataatatgctccttggtggatgcaagctgaggttgcatttgtatcccgttgacagtaataataagatgtatgtgcatcctcg

SEQ ID NO: 3492 - DNA, 200 bp, Digitaria sanguinalis
cgaggatgcacatacatcttattattactgtcaacgggatacaaatgcaacctcagcttgcatccaccaaggagcatattattaagcaagcgaatcaaggagtcgacgaacatgaaacaaacaagtccagcaaatacacacaaccgaacaagggacgcctacacattctgctctagcaaccaggcacgcctttcctgggc

SEQ ID NO: 3493 - DNA, 200 bp, Digitaria sanguinalis
ataataagatgtatgtgcatcctcgtagttcagttgccagtcttcagttgggagagatgtagccagccaccgtccaaaattaactggcccgcggcccgcaccttcctattattccttctgtctggtgtttttagccgggagaaattgtacatctggagaagggacatggctgctccgggctctggctagcagcgtgtgca

SEQ ID NO: 3494 - DNA, 200 bp, Digitaria sanguinalis
tgcacacgctgctagccagagcccggagcagccatgtcccttctccagatgtacaatttctcccggctaaaaacaccagacagaaggaataataggaaggtgcgggccgcgggccagttaattttggacggtggctggctacatctctcccaactgaagactggcaactgaactacgaggatgcacatacatcttattat

SEQ ID NO: 3495 - DNA, 200 bp, Digitaria sanguinalis
cgggctctggctagcagcgtgtgcagccaggaagctgttggtaagggcgtccaccatgggaggcaaaaccagtccatagtgactaaaatatttcattcaacctagctgacacattgtggaagtagtccatatagtagtccatagtaaaaggtacctataagcttatgggctgcccatatgaaataaaaaaaaacaatttc

SEQ ID NO: 3496 - DNA, 200 bp, Digitaria sanguinalis
gaaattgtttttttttatttcatatgggcagcccataagcttataggtaccttttactatggactactatatggactacttccacaatgtgtcagctaggttgaatgaaatattttagtcactatggactggttttgcctcccatggtggacgcccttaccaacagcttcctggctgcacacgctgctagccagagcccg

SEQ ID NO: 3497 - DNA, 200 bp, Digitaria sanguinalis
atatgaaataaaaaaaaacaatttctctctcacatacctctcatctctcttccttttcctctcaccactactgcctacttttggatgaccattgtgaagtttgcaatagttatgaagtttacaatagttatagagcactttcgtaaggttccaccactatgaattacttagtccgaaagaggctgcggcatgccgccgat

SEQ ID NO: 3498 - DNA, 200 bp, Digitaria sanguinalis
atcggcggcatgccgcagcctctttcggactaagtaattcatagtggtggaaccttacgaaagtgctctataactattgtaaacttcataactattgcaaacttcacaatggtcatccaaaagtaggcagtagtggtgagaggaaaaggaagagagatgagaggtatgtgagagagaaattgtttttttttatttcatat

SEQ ID NO: 3499 - DNA, 200 bp, Digitaria sanguinalis
aaagaggctgcggcatgccgccgattcgtttttgaccgttctatagactgcgtcttgcgagtctccatggcccgagacctctgtgtggccaatagatcgatgggcatggggctggctcctggcgtacacgcaacgactgcatttgcggagacgcggcgcatgcgtcgtgcgtgatcacgacgagaaaggagacgaaacga

SEQ ID NO: 3500 - DNA, 200 bp, Digitaria sanguinalis
tcgtttcgtctcctttctcgtcgtgatcacgcacgacgcatgcgccgcgtctccgcaaatgcagtcgttgcgtgtacgccaggagccagccccatgcccatcgatctattggccacacagaggtctcgggccatggagactcgcaagacgcagtctatagaacggtcaaaaacgaatcggcggcatgccgcagcctcttt

SEQ ID NO: 3501 - DNA, 200 bp, Digitaria sanguinalis
cacgacgagaaaggagacgaaacgaacgagagcgtgggccgagagacttcgcccgccatcgcttttgggcttaaaaggaagagcccagtggcccactacagatcggacgatgaggacgacggcgtggcatggcatccgcccatccggtattccggcaggaaggtacgggaagaatcggactctcgccttcgacgaccagg

SEQ ID NO: 3502 - DNA, 200 bp, Digitaria sanguinalis
cctggtcgtcgaaggcgagagtccgattcttcccgtaccttcctgccggaataccggatgggcggatgccatgccacgccgtcgtcctcatcgtccgatctgtagtgggccactgggctcttccttttaagcccaaaagcgatggcgggcgaagtctctcggcccacgctctcgttcgtttcgtctcctttctcgtcgtg

SEQ ID NO: 3503 - DNA, 200 bp, Digitaria sanguinalis
tatactgtgttcctgccaaactgattcatggctgaatgcattcagacaagtggggtccgttcacatactctatcgatgcttgtcaatgacaagccaggagttctaaatgttgttacgggggttttcgctcgaagaggttacaacattcaggtatgcaatcactatctagccttgtggtctggcgctgggtcctttgttgt

SEQ ID NO: 3504 - DNA, 200 bp, Digitaria sanguinalis
acaacaaaggacccagcgccagaccacaaggctagatagtgattgcatacctgaatgttgtaacctcttcgagcgaaaacccccgtaacaacatttagaactcctggcttgtcattgacaagcatcgatagagtatgtgaacggaccccacttgtctgaatgcattcagccatgaatcagtttggcaggaacacagtata

SEQ ID NO: 3505 - DNA, 200 bp, Digitaria sanguinalis
tctttagtttctcagcactgcaataatgctttgtaattgtaactgatattttcctagttgtttgcttgtttgcattgagtagatttgcactcatgctttctgttgactagtttcagatgaacaaattttctttccgaattggtttaatttgctgttcattccgttccattgggtactgaatacctgtccatcgtcatgaa

SEQ ID NO: 3506 - DNA, 200 bp, Digitaria sanguinalis
ttcatgacgatggacaggtattcagtacccaatggaacggaatgaacagcaaattaaaccaattcggaaagaaaatttgttcatctgaaactagtcaacagaaagcatgagtgcaaatctactcaatgcaaacaagcaaacaactaggaaaatatcagttacaattacaaagcattattgcagtgctgagaaactaaaga

SEQ ID NO: 3507 - DNA, 200 bp, Digitaria sanguinalis
ctgaatacctgtccatcgtcatgaagaaacagccttatggctaattggctattgatagttttgcaacattggtccttccaaggtgaacctagtatgtgtgtacttgtatatgacatcacttgcatatttttatattgaacatatctgacacattccagtgctcactcaatacttaatttgtcgtttgaactcttaaatat

SEQ ID NO: 3508 - DNA, 200 bp, Digitaria sanguinalis
atatttaagagttcaaacgacaaattaagtattgagtgagcactggaatgtgtcagatatgttcaatataaaaatatgcaagtgatgtcatatacaagtacacacatactaggttcaccttggaaggaccaatgttgcaaaactatcaatagccaattagccataaggctgtttcttcatgacgatggacaggtattcag

SEQ ID NO: 3509 - DNA, 200 bp, Digitaria sanguinalis
atttgtcgtttgaactcttaaatatatataaatgctcgcatatcctttttttttgttgccgtgttgtattttgaaaatacttttatcatcttcatgatattagttccaattttgaatgatggttttatatgtgcttttcttctacccagggtgatgtctatccagtggaatcttatgaaagtttttcagcaaatcaagtt

SEQ ID NO: 3510 - DNA, 200 bp, Digitaria sanguinalis
aacttgatttgctgaaaaactttcataagattccactggatagacatcaccctgggtagaagaaaagcacatataaaaccatcattcaaaattggaactaatatcatgaagatgataaaagtattttcaaaatacaacacggcaacaaaaaaaaaggatatgcgagcatttatatatatttaagagttcaaacgacaaat

SEQ ID NO: 3511 - DNA, 200 bp, Digitaria sanguinalis
tgaaagtttttcagcaaatcaagttcttgatgctcattggggtattatgactgatggtgatgtaagatcttgtatattctaatcactttgaactatttgatggtagctagagatgatttgcatctagttctactcatcctttcacaagaaattattgttgctaatagttaacaatcaagactgcaagatccaaattaaac

SEQ ID NO: 3512 - DNA, 200 bp, Digitaria sanguinalis
gtttaatttggatcttgcagtcttgattgttaactattagcaacaataatttcttgtgaaaggatgagtagaactagatgcaaatcatctctagctaccatcaaatagttcaaagtgattagaatatacaagatcttacatcaccatcagtcataataccccaatgagcatcaagaacttgatttgctgaaaaactttca

SEQ ID NO: 3513 - DNA, 200 bp, Digitaria sanguinalis
caagactgcaagatccaaattaaactctagtttgtataactaaattatggttcacagtgagaagtacaaaccataccatacagcagttaaatgtacctagtcatgaactaatctagaatttcttgttgcttcagtctacagggttttgttcacatactttatcgattcttgtgaatgatttccctggagttctcaatgtt

SEQ ID NO: 3514 - DNA, 200 bp, Digitaria sanguinalis
aacattgagaactccagggaaatcattcacaagaatcgataaagtatgtgaacaaaaccctgtagactgaagcaacaagaaattctagattagttcatgactaggtacatttaactgctgtatggtatggtttgtacttctcactgtgaaccataatttagttatacaaactagagtttaatttggatcttgcagtcttg

SEQ ID NO: 3515 - DNA, 200 bp, Digitaria sanguinalis
tgatttccctggagttctcaatgttgtgacaggtgttttttcccgaaggggctacaatattcaggttcttcaaaacccatttagtatattgtgctccctttaattagatcactacaggatccagtccttgctaaacagtaaccatcactgtcacagagtcttgctgttggcccagctgaaaaagaaggaacatctcgcat

SEQ ID NO: 3516 - DNA, 200 bp, Digitaria sanguinalis
atgcgagatgttccttctttttcagctgggccaacagcaagactctgtgacagtgatggttactgtttagcaaggactggatcctgtagtgatctaattaaagggagcacaatatactaaatgggttttgaagaacctgaatattgtagccccttcgggaaaaaacacctgtcacaacattgagaactccagggaaatca

SEQ ID NO: 3517 - DNA, 200 bp, Digitaria sanguinalis
ctgaaaaagaaggaacatctcgcatcactactgttgttcctggaactgacgaatctattgccaagctaatacatcaactgtacaagctgattgatgttcttgaggtcaataatttgcagtttccatgactgttatagaagtaatgcagttggtataattgttatagaagtagtgtggctcaaattattttttggtttctc

SEQ ID NO: 3518 - DNA, 200 bp, Digitaria sanguinalis
gagaaaccaaaaaataatttgagccacactacttctataacaattataccaactgcattacttctataacagtcatggaaactgcaaattattgacctcaagaacatcaatcagcttgtacagttgatgtattagcttggcaatagattcgtcagttccaggaacaacagtagtgatgcgagatgttccttctttttcag

SEQ ID NO: 3519 - DNA, 200 bp, Digitaria sanguinalis
ggctcaaattattttttggtttctcaggtcaaggattttactcatttaccatttgctgctagagttaatgatcataaaggttgctgcaaatgctgcagctagaagggatgtcctagatattgctcagatttttgaggccccaaaagttgacatatcagaccacacaattacactacaggtaaactgttattgaaaaactt

SEQ ID NO: 3520 - DNA, 200 bp, Digitaria sanguinalis
aagtttttcaataacagtttacctgtagtgtaattgtgtggtctgatatgtcaacttttggggcctcaaaaatctgagcaatatctaggacatcccttctagctgcagcatttgcagcaacctttatgatcattaactctagcagcaaatggtaaatgagtaaaatccttgacctgagaaaccaaaaaataatttgagcc

SEQ ID NO: 3521 - DNA, 200 bp, Digitaria sanguinalis
caggtaaactgttattgaaaaacttttatttaaatatacctcatataggactgtaagattcttctgaaagtatgatattgaagtactggtccaaccatgaagggactaatatattgatgttaataggtcaaataatgtcaggtattagcatattttagcaattggcaatcgttgaagaaagagttatttgaaatttgtaa

SEQ ID NO: 3522 - DNA, 200 bp, Digitaria sanguinalis
ttacaaatttcaaataactctttcttcaacgattgccaattgctaaaatatgctaatacctgacattatttgacctattaacatcaatatattagtcccttcatggttggaccagtacttcaatatcatactttcagaagaatcttacagtcctatatgaggtatatttaaataaaagtttttcaataacagtttacctg

SEQ ID NO: 3523 - DNA, 200 bp, Digitaria sanguinalis
agaaagagttatttgaaatttgtaatttttggactcagtcaatcattttctttctgctttgcttttgactaatgatcattcatacctgcactgacttttttaatcaatcatgtttcattagtactgtgcctagtgagctatatcttgttgtcttgtgcagcttaccggagacattgacagaatggttagattgcaaaaaa

SEQ ID NO: 3524 - DNA, 200 bp, Digitaria sanguinalis
ttttttgcaatctaaccattctgtcaatgtctccggtaagctgcacaagacaacaagatatagctcactaggcacagtactaatgaaacatgattgattaaaaaagtcagtgcaggtatgaatgatcattagtcaaaagcaaagcagaaagaaaatgattgactgagtccaaaaattacaaatttcaaataactctttct

SEQ ID NO: 3525 - DNA, 200 bp, Digitaria sanguinalis
gacagaatggttagattgcaaaaaatggtagagcaatacggcatctgtgaggtttgtgctgactatggagcttctaattcactgatatgtctgtcattaccttaccatttcatgcatgatgattttgtttttctcacaagttattaattgccaatgttaattgtacttcagcaacctcaaggagacgcttgaaatatatt

SEQ ID NO: 3526 - DNA, 200 bp, Digitaria sanguinalis
aatatatttcaagcgtctccttgaggttgctgaagtacaattaacattggcaattaataacttgtgagaaaaacaaaatcatcatgcatgaaatggtaaggtaatgacagacatatcagtgaattagaagctccatagtcagcacaaacctcacagatgccgtattgctctaccattttttgcaatctaaccattctgtc

SEQ ID NO: 3527 - DNA, 200 bp, Digitaria sanguinalis
ctcaaggagacgcttgaaatatatttatgtaattctgtctcttttcttatgcctactacaggttgcacgaactggccgggttgctctgctccgtgagtctggagtggactccaagtacctccgtggattcgacctcccgctccccctgtagttctccattcactgacataccactctacggttttacgctgtggttccat

SEQ ID NO: 3528 - DNA, 200 bp, Digitaria sanguinalis
atggaaccacagcgtaaaaccgtagagtggtatgtcagtgaatggagaactacagggggagcgggaggtcgaatccacggaggtacttggagtccactccagactcacggagcagagcaacccggccagttcgtgcaacctgtagtaggcataagaaaagagacagaattacataaatatatttcaagcgtctccttgag

SEQ ID NO: 3529 - DNA, 200 bp, Digitaria sanguinalis
ctacggttttacgctgtggttccatttggtcttttgagcatgatgcagcgtttaatgtttcctttgggaccaacagtattagaaagataactcaaaaccaaagagtgagaatcataggaagaatattctgtgcaatcgtgttaattggctgcagagataggttatctggattgctatgggcttatgctgtaagtttcttg

SEQ ID NO: 3530 - DNA, 200 bp, Digitaria sanguinalis
caagaaacttacagcataagcccatagcaatccagataacctatctctgcagccaattaacacgattgcacagaatattcttcctatgattctcactctttggttttgagttatctttctaatactgttggtcccaaaggaaacattaaacgctgcatcatgctcaaaagaccaaatggaaccacagcgtaaaaccgtag

SEQ ID NO: 3531 - DNA, 200 bp, Digitaria sanguinalis
atgggcttatgctgtaagtttcttgattatgtaagtagtaaagtagcactcatttgctctgaaagaaatggaaatctcacggagcaaacgggaggtttgtggaatcagaaatgaccctaccaagcataacaggtcggttggcattggcacagctaacaaaaccgatcaaatgagagataagatagtgcaagttttattga

SEQ ID NO: 3532 - DNA, 200 bp, Digitaria sanguinalis
tcaataaaacttgcactatcttatctctcatttgatcggttttgttagctgtgccaatgccaaccgacctgttatgcttggtagggtcatttctgattccacaaacctcccgtttgctccgtgagatttccatttctttcagagcaaatgagtgctactttactacttacataatcaagaaacttacagcataagcccat

SEQ ID NO: 3533 - DNA, 200 bp, Digitaria sanguinalis
gataagatagtgcaagttttattgatatagaggaaaaagaatacaagactagcactgaggctataggtaggaaaaaactacataggtataattttattccaaatagacaggtataattttacccttcaccttttcaaatatccttggcatactgtattcctcacgattccaagaatctacgcccgttttattcatgttcg

SEQ ID NO: 3534 - DNA, 200 bp, Digitaria sanguinalis
cgaacatgaataaaacgggcgtagattcttggaatcgtgaggaatacagtatgccaaggatatttgaaaaggtgaagggtaaaattatacctgtctatttggaataaaattatacctatgtagttttttcctacctatagcctcagtgctagtcttgtattctttttcctctatatcaataaaacttgcactatcttatc

SEQ ID NO: 3535 - DNA, 200 bp, Digitaria sanguinalis
tctacgcccgttttattcatgttcgcctaaatggcggtgtgttcggtgtgtacgttttattcagtgttcgcctaaatggccgtgtattcggcgtgtacacagtacacggcggttaattgtgcaatttagggtataaacattagtttacatggtttgcttgtttacacggatttacacggtccaaacagcctacacggcac

SEQ ID NO: 3536 - DNA, 200 bp, Digitaria sanguinalis
gtgccgtgtaggctgtttggaccgtgtaaatccgtgtaaacaagcaaaccatgtaaactaatgtttataccctaaattgcacaattaaccgccgtgtactgtgtacacgccgaatacacggccatttaggcgaacactgaataaaacgtacacaccgaacacaccgccatttaggcgaacatgaataaaacgggcgtaga

SEQ ID NO: 3537 - DNA, 200 bp, Digitaria sanguinalis
acggtccaaacagcctacacggcacattaaaaacacggttttgcatggcatgttggcattttcttcttcgtttaggcgatggagatccaagaagattccaatctgaaccagaagatgtcctaaccagcctaatctgaacatgcttgttagtcctatgttaatctatccgttgtaatttgtggtagcatatgacttatgag

SEQ ID NO: 3538 - DNA, 200 bp, Digitaria sanguinalis
ctcataagtcatatgctaccacaaattacaacggatagattaacataggactaacaagcatgttcagattaggctggttaggacatcttctggttcagattggaatcttcttggatctccatcgcctaaacgaagaagaaaatgccaacatgccatgcaaaaccgtgtttttaatgtgccgtgtaggctgtttggaccgt

SEQ ID NO: 3539 - DNA, 200 bp, Digitaria sanguinalis
tttgtggtagcatatgacttatgagttgtatttcctagataatggatgacagctatatttaattacctatcactttttaattggttaagtgaataaattgtctaaccatgagattatatgtatatttttctaatatagcacaaaaacgtgtaatccataaattccgtctaaacggtctaaacgctacacgacaccttttc

SEQ ID NO: 3540 - DNA, 200 bp, Digitaria sanguinalis
gaaaaggtgtcgtgtagcgtttagaccgtttagacggaatttatggattacacgtttttgtgctatattagaaaaatatacatataatctcatggttagacaatttattcacttaaccaattaaaaagtgataggtaattaaatatagctgtcatccattatctaggaaatacaactcataagtcatatgctaccacaaa

SEQ ID NO: 3541 - DNA, 200 bp, Digitaria sanguinalis
tctaaacgctacacgacaccttttcaattgtttagtgtttacggtttaagctaacactggttttatcaatgtctttttgctatttttggactaggtcgaggtagccgaaggtttcttgtttctctggctgaaagttcaatcgcaagcccgacggactgactttgtgtttcgtgtcggcccatgatttgggtttatcgagg

SEQ ID NO: 3542 - DNA, 200 bp, Digitaria sanguinalis
cctcgataaacccaaatcatgggccgacacgaaacacaaagtcagtccgtcgggcttgcgattgaactttcagccagagaaacaagaaaccttcggctacctcgacctagtccaaaaatagcaaaaagacattgataaaaccagtgttagcttaaaccgtaaacactaaacaattgaaaaggtgtcgtgtagcgtttaga

SEQ ID NO: 3543 - DNA, 200 bp, Digitaria sanguinalis
ggcccatgatttgggtttatcgaggttgggaggtgcctgctactccctccctccctcctgcaagggattatagcctagcccaacgagtcagaaagaactatatcaaataattcaatgaaccgatgttggcccacaaaaagactaaatatataagctgctgctatttgcaattttgataaggctttcatcccgggctggac

SEQ ID NO: 3544 - DNA, 200 bp, Digitaria sanguinalis
gtccagcccgggatgaaagccttatcaaaattgcaaatagcagcagcttatatatttagtctttttgtgggccaacatcggttcattgaattatttgatatagttctttctgactcgttgggctaggctataatcccttgcaggagggagggagggagtagcaggcacctcccaacctcgataaacccaaatcatgggcc

SEQ ID NO: 3545 - DNA, 200 bp, Digitaria sanguinalis
ataaggctttcatcccgggctggacctgtgcgcaggtgttaggctagctaaagctaggttgatttttagtgtttttagctcatgcaggacaacttattttggaggaacaactccacgttgctgctacaaatagatagataggtagatatggcacatgtattggaggaacctctccaatgtgctaataggtagaaacagca

SEQ ID NO: 3546 - DNA, 200 bp, Digitaria sanguinalis
tgctgtttctacctattagcacattggagaggttcctccaatacatgtgccatatctacctatctatctatttgtagcagcaacgtggagttgttcctccaaaataagttgtcctgcatgagctaaaaacactaaaaatcaacctagctttagctagcctaacacctgcgcacaggtccagcccgggatgaaagccttat

SEQ ID NO: 3547 - DNA, 200 bp, Digitaria sanguinalis
aatgtgctaataggtagaaacagcacaaagtgtttatgaaccacttcaacgtgttgagctagatatcattctagagatgaagatagaccaaaaggtcggaatccgaatccacggatcacatgagcttaatccaaagcccttaggatacaagatttagtccaagatctaaacggtagaacaacatgttctattcataaggt

SEQ ID NO: 3548 - DNA, 200 bp, Digitaria sanguinalis
accttatgaatagaacatgttgttctaccgtttagatcttggactaaatcttgtatcctaagggctttggattaagctcatgtgatccgtggattcggattccgaccttttggtctatcttcatctctagaatgatatctagctcaacacgttgaagtggttcataaacactttgtgctgtttctacctattagcacatt

SEQ ID NO: 3549 - DNA, 200 bp, Digitaria sanguinalis
tgataaatcggattgcaggagtttttgcaaggaggggatataatatcgagtcccttgctgttggtttaaacaaggataaagctctttttactatagttgtatcgggaactgaaagagtgttggagcaagtcatgaaacaacttctaaagctcgttaatgttttaaaggttgaagatatatcaaaggagccacaagtagaa

SEQ ID NO: 3550 - DNA, 200 bp, Digitaria sanguinalis
ttctacttgtggctcctttgatatatcttcaacctttaaaacattaacgagctttagaagttgtttcatgacttgctccaacactctttcagttcccgatacaactatagtaaaaagagctttatccttgtttaaaccaacagcaagggactcgatattatatcccctccttgcaaaaactcctgcaatccgatttatca

SEQ ID NO: 3551 - DNA, 200 bp, Digitaria sanguinalis
tatatcaaaggagccacaagtagaacgtgagttgatgctcatcaagataaatgctgatccaagataccgtttagaggtcaagtggttagtggacatatttagagctagaattgttgatatttcagagcactctataactattgaggttactggtgacccagggaaaatggttgcggtgcaaagaaatttaagcaagtttg

SEQ ID NO: 3552 - DNA, 200 bp, Digitaria sanguinalis
caaacttgcttaaatttctttgcaccgcaaccattttccctgggtcaccagtaacctcaatagttatagagtgctctgaaatatcaacaattctagctctaaatatgtccactaaccacttgacctctaaacggtatcttggatcagcatttatcttgatgagcatcaactcacgttctacttgtggctcctttgatata

SEQ ID NO: 3553 - DNA, 200 bp, Digitaria sanguinalis
gtgcaaagaaatttaagcaagtttgggatcaaagaagttgctaggaccgggaagattgccttgagaagagaaagaatgggtgaagatgctcctttctggcggttttcagcagcttcatatcctgaccttgaagaaatgaacaaaagaactcctcttcaagccaaaaagagaatggagtatcaggaatctgataagcctgc

SEQ ID NO: 3554 - DNA, 200 bp, Digitaria sanguinalis
gcaggcttatcagattcctgatactccattctctttttggcttgaagaggagttcttttgttcatttcttcaaggtcaggatatgaagctgctgaaaaccgccagaaaggagcatcttcacccattctttctcttctcaaggcaatcttcccggtcctagcaacttctttgatcccaaacttgcttaaatttctttgcac

SEQ ID NO: 3555 - DNA, 200 bp, Digitaria sanguinalis
ttatatatctccctgagtgcctttcaatagttatagttggattgactaataagtaataattcatctatgaatgacccaaataaaggttaccagtcaacaaattagtactcacccttacaaagttgttataaatatcgttaatcacctcaatccttccagaagtaactcctgtaaaactctgtctaaccataactgttgtc

SEQ ID NO: 3556 - DNA, 200 bp, Digitaria sanguinalis
gacaacagttatggttagacagagttttacaggagttacttctggaaggattgaggtgattaacgatatttataacaactttgtaagggtgagtactaatttgttgactggtaacctttatttgggtcattcatagatgaattattacttattagtcaatccaactataactattgaaaggcactcagggagatatataa

SEQ ID NO: 3557 - DNA, 200 bp, Digitaria sanguinalis
actctgtctaaccataactgttgtcaggcgatttcccacaaaagaatttgcgaaaatgttgataaagaaaccagagcgaattcctagtctcctatcccagtatttctgaactgacttggaaggtttgcgctggcggtggctgatgccataacaaagatggggtccggagatgttaattttagtcttgttttattaattgg

SEQ ID NO: 3558 - DNA, 200 bp, Digitaria sanguinalis
ccaattaataaaacaagactaaaattaacatctccggaccccatctttgttatggcatcagccaccgccagcgcaaaccttccaagtcagttcagaaatactgggataggagactaggaattcgctctggtttctttatcaacattttcgcaaattcttttgtgggaaatcgcctgacaacagttatggttagacagagt

SEQ ID NO: 3559 - DNA, 200 bp, Digitaria sanguinalis
attttagtcttgttttattaattggaatttcatttcatgatccaggttagagatattacacacctgccatttgctgagcgagaattgatgctgataaaggtcgctgtgaatactactgcacggcgggatgtccttgacattgccagcatattcagagctaaggcagttgatgtctcggatcataccattactcttgaggt

SEQ ID NO: 3560 - DNA, 200 bp, Digitaria sanguinalis
acctcaagagtaatggtatgatccgagacatcaactgccttagctctgaatatgctggcaatgtcaaggacatcccgccgtgcagtagtattcacagcgacctttatcagcatcaattctcgctcagcaaatggcaggtgtgtaatatctctaacctggatcatgaaatgaaattccaattaataaaacaagactaaaat

SEQ ID NO: 3561 - DNA, 200 bp, Digitaria sanguinalis
ttttaatacattatgatgtggcaaatttttaaatctttggtattcacttcagaaaaataatgtgtaagctgccaaaaatagggaatgtttctattgtacattgttaacatgtgttagcaactgtcatcagtgatcctgttcgaaaacatgtggcaatcagttttattgccttagtggggatctttatgttggagaaagta

SEQ ID NO: 3562 - DNA, 200 bp, Digitaria sanguinalis
tactttctccaacataaagatccccactaaggcaataaaactgattgccacatgttttcgaacaggatcactgatgacagttgctaacacatgttaacaatgtacaatagaaacattccctatttttggcagcttacacattatttttctgaagtgaataccaaagatttaaaaatttgccacatcataatgtattaaaa

SEQ ID NO: 3563 - DNA, 200 bp, Digitaria sanguinalis
ggggatctttatgttggagaaagtattttattttagctcatataaatcataaaaagtgagaaactttcaaaatcaggtaactgtcaggacaaaaaacattttatttttttatattaaaaacaagcaatcttccatatatgttgattttgtactaaggttgtgaaccaaaacacaacttcaaatctgtccacattatcagg

SEQ ID NO: 3564 - DNA, 200 bp, Digitaria sanguinalis
cctgataatgtggacagatttgaagttgtgttttggttcacaaccttagtacaaaatcaacatatatggaagattgcttgtttttaatataaaaaaataaaatgttttttgtcctgacagttacctgattttgaaagtttctcactttttatgatttatatgagctaaaataaaatactttctccaacataaagatcccc

SEQ ID NO: 3565 - DNA, 200 bp, Digitaria sanguinalis
cttcaaatctgtccacattatcaggttcgtttttgtcaatataaaagtaactattctttttgtcacatactatgccctgtagtggtgtccaggaacttagggaatcagtaattactgcatgtccatacagcaaagtagcattcttattttgtaagatctgtaaatcgttccatactgatactgtagcaaaacgttattaa

SEQ ID NO: 3566 - DNA, 200 bp, Digitaria sanguinalis
ttaataacgttttgctacagtatcagtatggaacgatttacagatcttacaaaataagaatgctactttgctgtatggacatgcagtaattactgattccctaagttcctggacaccactacagggcatagtatgtgacaaaaagaatagttacttttatattgacaaaaacgaacctgataatgtggacagatttgaag

SEQ ID NO: 3567 - DNA, 200 bp, Digitaria sanguinalis
tgatactgtagcaaaacgttattaattgttcccctagtaagtaattattaacactttccctttttaatttatagggttgtaaagcgtcacacactatcagtttttgttggtgatgaaagtgggatgatcaatcgaattgctggggtttttgctagaagaggatataacatcgagtcattggctgttgggctaaacaagga

SEQ ID NO: 3568 - DNA, 200 bp, Digitaria sanguinalis
tccttgtttagcccaacagccaatgactcgatgttatatcctcttctagcaaaaaccccagcaattcgattgatcatcccactttcatcaccaacaaaaactgatagtgtgtgacgctttacaaccctataaattaaaaagggaaagtgttaataattacttactaggggaacaattaataacgttttgctacagtatca

SEQ ID NO: 3569 - DNA, 200 bp, Digitaria sanguinalis
cattggctgttgggctaaacaaggataaagcattatttacaatagtagtgtcaggaacagacaaagtattgaaccaagttgtagagcaactaaacaaacttgttaatgttataaaggtcagtattttttcctcttaacatgtggcttacaaaaatgattagtatgtcacagaagtcatcactctttgtcttgtactgaga

SEQ ID NO: 3570 - DNA, 200 bp, Digitaria sanguinalis
tctcagtacaagacaaagagtgatgacttctgtgacatactaatcatttttgtaagccacatgttaagaggaaaaaatactgacctttataacattaacaagtttgtttagttgctctacaacttggttcaatactttgtctgttcctgacactactattgtaaataatgctttatccttgtttagcccaacagccaatg

SEQ ID NO: 3571 - DNA, 200 bp, Digitaria sanguinalis
catcactctttgtcttgtactgagactgttgaacatagtatcttatattcacatcttaacatttggattaataaacaggttgttgacttatcaaatgtaccacaagttgaaagagaactgatgcttataaaaataaatgcggagcgagagaagctgcctgaggtataatcatacatatctttcaaaacgtatctgttctg

SEQ ID NO: 3572 - DNA, 200 bp, Digitaria sanguinalis
cagaacagatacgttttgaaagatatgtatgattatacctcaggcagcttctctcgctccgcatttatttttataagcatcagttctctttcaacttgtggtacatttgataagtcaacaacctgtttattaatccaaatgttaagatgtgaatataagatactatgttcaacagtctcagtacaagacaaagagtgatg

SEQ ID NO: 3573 - DNA, 200 bp, Digitaria sanguinalis
tatctttcaaaacgtatctgttctgaccttgtaaccttaagaatgaatattggatattacgtttgtagaaagaaatatataaattgataacaaagatatcagaaatcaggtctgttggtgcaaactagcacattaaacttcattgttggggtaacatctatagttgtgaatgcagataattgttttggctcgcattttca

SEQ ID NO: 3574 - DNA, 200 bp, Digitaria sanguinalis
tgaaaatgcgagccaaaacaattatctgcattcacaactatagatgttaccccaacaatgaagtttaatgtgctagtttgcaccaacagacctgatttctgatatctttgttatcaatttatatatttctttctacaaacgtaatatccaatattcattcttaaggttacaaggtcagaacagatacgttttgaaagata

SEQ ID NO: 3575 - DNA, 200 bp, Digitaria sanguinalis
ataattgttttggctcgcattttcaaagcagaagtggttgatctttcagacgatacactaactttggaggtaatgtcgttgttgtgccttgactcaaagataactcaatttatcgttcttatggttctttcttgtggatatgttcaaggtaactggagatccaggaaagatggctgcactacaaaagactctgagcaaat

SEQ ID NO: 3576 - DNA, 200 bp, Digitaria sanguinalis
atttgctcagagtcttttgtagtgcagccatctttcctggatctccagttaccttgaacatatccacaagaaagaaccataagaacgataaattgagttatctttgagtcaaggcacaacaacgacattacctccaaagttagtgtatcgtctgaaagatcaaccacttctgctttgaaaatgcgagccaaaacaattat

SEQ ID NO: 3577 - DNA, 200 bp, Digitaria sanguinalis
gcactacaaaagactctgagcaaatatgggatcatagaaattgctagaactggcaaggtcattattgttcagaaaatagtgaaaatttattgtgatcttgttctacactatatctaacgagccttagtgatgttatagatagctttgcgccgtgaaagaatgggagaatctgctccattttgggggttctctgcagcatc

SEQ ID NO: 3578 - DNA, 200 bp, Digitaria sanguinalis
gatgctgcagagaacccccaaaatggagcagattctcccattctttcacggcgcaaagctatctataacatcactaaggctcgttagatatagtgtagaacaagatcacaataaattttcactattttctgaacaataatgaccttgccagttctagcaatttctatgatcccatatttgctcagagtcttttgtagtgc

SEQ ID NO: 3579 - DNA, 200 bp, Digitaria sanguinalis
cattttgggggttctctgcagcatcttatcctgatctcgaagtgacaataccttcaaattctcgtctaagcactggaatggatgccgtgagtcagaatcccaatgaatcttcaggggtaagaaaccacaattgtccttttatctgatcaatggatgtatggcgtgttctttagtttctaagcaccgcagtgctgttttgt

SEQ ID NO: 3580 - DNA, 200 bp, Digitaria sanguinalis
acaaaacagcactgcggtgcttagaaactaaagaacacgccatacatccattgatcagataaaaggacaattgtggtttcttacccctgaagattcattgggattctgactcacggcatccattccagtgcttagacgagaatttgaaggtattgtcacttcgagatcaggataagatgctgcagagaacccccaaaatg

SEQ ID NO: 3581 - DNA, 200 bp, Digitaria sanguinalis
tctaagcaccgcagtgctgttttgtaattgtaactgatatttccctatttgtttgcttgtctgcatcgagtagatttgcactcatgctttctgttgactagtttcggatgaacaaattgttctttctgaattcgtttacattgctgttcattctgttcaattgggtactaaatacctgtctatcttcatgaagaaacagc

SEQ ID NO: 3582 - DNA, 200 bp, Digitaria sanguinalis
gctgtttcttcatgaagatagacaggtatttagtacccaattgaacagaatgaacagcaatgtaaacgaattcagaaagaacaatttgttcatccgaaactagtcaacagaaagcatgagtgcaaatctactcgatgcagacaagcaaacaaatagggaaatatcagttacaattacaaaacagcactgcggtgcttaga

SEQ ID NO: 3583 - DNA, 200 bp, Digitaria sanguinalis
ctgtctatcttcatgaagaaacagccttatggctaattggctattgatagttttgcaatattggtcccttccaaggtgaacctagtatgtgtgtacttgtatatgacatcacttgcatatttttatattgaacatatctgacacattccagtgctcactcaatacttaatttgtcgtttgaactcttaagtatatataaa

SEQ ID NO: 3584 - DNA, 200 bp, Digitaria sanguinalis
tttatatatacttaagagttcaaacgacaaattaagtattgagtgagcactggaatgtgtcagatatgttcaatataaaaatatgcaagtgatgtcatatacaagtacacacatactaggttcaccttggaagggaccaatattgcaaaactatcaatagccaattagccataaggctgtttcttcatgaagatagacag

SEQ ID NO: 3585 - DNA, 200 bp, Digitaria sanguinalis
gtttgaactcttaagtatatataaaatgcttgctcatcttttgttattggagtgttgtattttgaatgcttgctcatcttttatataaaatgcttgctcatcttttatttaaaatgcttgttcatattagtttcaattttgaatgattgttttatacatgcttttcttcttctacccagggcgatgtctatccagtggaa

SEQ ID NO: 3586 - DNA, 200 bp, Digitaria sanguinalis
ttccactggatagacatcgccctgggtagaagaagaaaagcatgtataaaacaatcattcaaaattgaaactaatatgaacaagcattttaaataaaagatgagcaagcattttatataaaagatgagcaagcattcaaaatacaacactccaataacaaaagatgagcaagcattttatatatacttaagagttcaaac

SEQ ID NO: 3587 - DNA, 200 bp, Digitaria sanguinalis
ccagggcgatgtctatccagtggaatcgtatgaaagtttttcagcaaatcaaattcttgatgctcattggggtattatgacagatggtgatgtaagatcttgtatattctaatcactttgaactatttgatggtagctagagatgatttgcatctagttctactcatcctttcacaagaagttattgtgttgctaatagt

SEQ ID NO: 3588 - DNA, 200 bp, Digitaria sanguinalis
actattagcaacacaataacttcttgtgaaaggatgagtagaactagatgcaaatcatctctagctaccatcaaatagttcaaagtgattagaatatacaagatcttacatcaccatctgtcataataccccaatgagcatcaagaatttgatttgctgaaaaactttcatacgattccactggatagacatcgccctgg

SEQ ID NO: 3589 - DNA, 200 bp, Digitaria sanguinalis
aagaagttattgtgttgctaatagttaacaatcaagactgcaagatccaaattaaactctagtttgtataactaaattatggttcacagtgagaagtacaaaccataccatacagcagttaaatgtacctaattatgaattaatcgaggaatttcttgttgcttcagtcaatagggttttgttcacatactttatcgatt

SEQ ID NO: 3590 - DNA, 200 bp, Digitaria sanguinalis
aatcgataaagtatgtgaacaaaaccctattgactgaagcaacaagaaattcctcgattaattcataattaggtacatttaactgctgtatggtatggtttgtacttctcactgtgaaccataatttagttatacaaactagagtttaatttggatcttgcagtcttgattgttaactattagcaacacaataacttctt

SEQ ID NO: 3591 - DNA, 200 bp, Digitaria sanguinalis
gttttgttcacatactttatcgattctcgtgaatgattttcctggagttctcaatgttgtgacaggtgttttctcccgaaggggctacaatattcaggttcttcaaaacccatttagtatattgtgctccctttaattagatcactacaggatccagtccttgctaaacagtaaccatcactgtcacagagtcttgctgt

SEQ ID NO: 3592 - DNA, 200 bp, Digitaria sanguinalis
acagcaagactctgtgacagtgatggttactgtttagcaaggactggatcctgtagtgatctaattaaagggagcacaatatactaaatgggttttgaagaacctgaatattgtagccccttcgggagaaaacacctgtcacaacattgagaactccaggaaaatcattcacgagaatcgataaagtatgtgaacaaaac

SEQ ID NO: 3593 - DNA, 200 bp, Digitaria sanguinalis
catcactgtcacagagtcttgctgttggcccagctgaaaaagaaggaacatctcgcatcactactgttgttcctggaactgacgaatctattgccaagctaatacatcaactgtacaagctgattgatgttcttgaggtcaataatttgcagtttccatgactgttatagaagtaatgcagttggtataattgttataga

SEQ ID NO: 3594 - DNA, 200 bp, Digitaria sanguinalis
tctataacaattataccaactgcattacttctataacagtcatggaaactgcaaattattgacctcaagaacatcaatcagcttgtacagttgatgtattagcttggcaatagattcgtcagttccaggaacaacagtagtgatgcgagatgttccttctttttcagctgggccaacagcaagactctgtgacagtgatg

SEQ ID NO: 3595 - DNA, 200 bp, Digitaria sanguinalis
atgcagttggtataattgttatagaagtagtgtggctcaaattattttttggtttctcaggtcaaggattttactcatttaccatttgctgctagagagttaatgatcataaaggttgctgcaaatgctgcagctcgaagggatgtcctagatattgctcagatttttgaggccccaaaagttgacatatcagaccacac

SEQ ID NO: 3596 - DNA, 200 bp, Digitaria sanguinalis
gtgtggtctgatatgtcaacttttggggcctcaaaaatctgagcaatatctaggacatcccttcgagctgcagcatttgcagcaacctttatgatcattaactctctagcagcaaatggtaaatgagtaaaatccttgacctgagaaaccaaaaaataatttgagccacactacttctataacaattataccaactgcat

SEQ ID NO: 3597 - DNA, 200 bp, Digitaria sanguinalis
caaaagttgacatatcagaccacacaattacactacaggtaactgttattgaaataacttttatttaaatatacctcatataggactataagattcttctgaaagtatgatagtttaatcatctttatgtacacaataacgacttcatattgttcatatatggtattttttaatgcgtattgtagtattggtccaaccat

SEQ ID NO: 3598 - DNA, 200 bp, Digitaria sanguinalis
atggttggaccaatactacaatacgcattaaaaaataccatatatgaacaatatgaagtcgttattgtgtacataaagatgattaaactatcatactttcagaagaatcttatagtcctatatgaggtatatttaaataaaagttatttcaataacagttacctgtagtgtaattgtgtggtctgatatgtcaacttttg

SEQ ID NO: 3599 - DNA, 200 bp, Digitaria sanguinalis
cgtattgtagtattggtccaaccatgaagggactaatatattgatgttaataggccaaatatgtcaggtattagcatattttagcaattggcaatctttgaataaagagttatttgaaattcgtaaattttggactcatcattttcttttctactttgcctttgactaatgatcttttctacctgcactgacttctttaa

SEQ ID NO: 3600 - DNA, 200 bp, Digitaria sanguinalis
ttaaagaagtcagtgcaggtagaaaagatcattagtcaaaggcaaagtagaaaagaaaatgatgagtccaaaatttacgaatttcaaataactctttattcaaagattgccaattgctaaaatatgctaatacctgacatatttggcctattaacatcaatatattagtcccttcatggttggaccaatactacaatacg

SEQ ID NO: 3601 - DNA, 200 bp, Digitaria sanguinalis
tttctacctgcactgacttctttaatcaatcgtgtttcattagccgtgcctagtgagtaataatcttgttggtctgtgcagcttaccggagacattgacagaatggttagattgcaaaagatggtagagcaatatggcatctgtgaggtttgtgttgactatgttgcttctaatttcactgatatgtctggcattacctt

SEQ ID NO: 3602 - DNA, 200 bp, Digitaria sanguinalis
aaggtaatgccagacatatcagtgaaattagaagcaacatagtcaacacaaacctcacagatgccatattgctctaccatcttttgcaatctaaccattctgtcaatgtctccggtaagctgcacagaccaacaagattattactcactaggcacggctaatgaaacacgattgattaaagaagtcagtgcaggtagaaa

SEQ ID NO: 3603 - DNA, 200 bp, Digitaria sanguinalis
tcactgatatgtctggcattaccttaccatttcatgcatgatgattttctttttctcacaagttattaattgccagtgttacttcagcaacctcaaggagacacttgaaatatatttatgtaattgtctttcctctttgcctatgcctactgcaggttgcacgaactggccgggttgctctgctccgtgagtctggagtc

SEQ ID NO: 3604 - DNA, 200 bp, Digitaria sanguinalis
gactccagactcacggagcagagcaacccggccagttcgtgcaacctgcagtaggcataggcaaagaggaaagacaattacataaatatatttcaagtgtctccttgaggttgctgaagtaacactggcaattaataacttgtgagaaaaagaaaatcatcatgcatgaaatggtaaggtaatgccagacatatcagtga

SEQ ID NO: 3605 - DNA, 200 bp, Digitaria sanguinalis
tgctctgctccgtgagtctggagtcgactccaagtacctccgtggattcgagctgccgctgtagttatccattcactgacataccactacggttttactccgtgcttccatttggtcttctgagcatatgatgcagcttttcatgtttccctttggaccaacagtagaagaaatataactcaaaaccaaaggttgggaat

SEQ ID NO: 3606 - DNA, 200 bp, Digitaria sanguinalis
attcccaacctttggttttgagttatatttcttctactgttggtccaaagggaaacatgaaaagctgcatcatatgctcagaagaccaaatggaagcacggagtaaaaccgtagtggtatgtcagtgaatggataactacagcggcagctcgaatccacggaggtacttggagtcgactccagactcacggagcagagca

SEQ ID NO: 3607 - DNA, 200 bp, Digitaria sanguinalis
taactcaaaaccaaaggttgggaatcataggcggaatattctgtacaatcgtgttaattggctaaacagtgataggttatatgggttgctatgggcttatgctgtaagtttcttgattttgtaagtagcactcatttgctcagttaaaaattgaaatctcacggagcaaacgggaggtttgtggaatcataaatgaacct

SEQ ID NO: 3608 - DNA, 200 bp, Digitaria sanguinalis
aggttcatttatgattccacaaacctcccgtttgctccgtgagatttcaatttttaactgagcaaatgagtgctacttacaaaatcaagaaacttacagcataagcccatagcaacccatataacctatcactgtttagccaattaacacgattgtacagaatattccgcctatgattcccaacctttggttttgagtta

SEQ ID NO: 3609 - DNA, 200 bp, Digitaria sanguinalis
ggtttgtggaatcataaatgaacctaccaagcataacaggtgggttggcattggcacagctagcgcaaccgatcaaatgagagatcagattgtgcgagttttattgatatagcagaaaaagctaagactattacactgggaggccatataggtggaaagaaatgtataattttgctccaaataaacaggtataatttaat

SEQ ID NO: 3610 - DNA, 200 bp, Digitaria sanguinalis
attaaattatacctgtttatttggagcaaaattatacatttctttccacctatatggcctcccagtgtaatagtcttagctttttctgctatatcaataaaactcgcacaatctgatctctcatttgatcggttgcgctagctgtgccaatgccaacccacctgttatgcttggtaggttcatttatgattccacaaacc

SEQ ID NO: 3611 - DNA, 200 bp, Digitaria sanguinalis
tccaaataaacaggtataatttaatttacctgtcaccttttcaaatatactcggcacatttactgtattctgacgattcaagaatctacgctcgttgtatcaatatctttttgctatttttggactaggtcgagctagcggaagatttttctctgggctgaatgttccatcccaagcccgacggaccttctttaatttgt

SEQ ID NO: 3612 - DNA, 200 bp, Digitaria sanguinalis
acaaattaaagaaggtccgtcgggcttgggatggaacattcagcccagagaaaaatcttccgctagctcgacctagtccaaaaatagcaaaaagatattgatacaacgagcgtagattcttgaatcgtcagaatacagtaaatgtgccgagtatatttgaaaaggtgacaggtaaattaaattatacctgtttatttgga

SEQ ID NO: 3613 - DNA, 200 bp, Digitaria sanguinalis
gcccgacggaccttctttaatttgtgtttcgtgtcagaccatgatttgggtttattggggtgggattcctacccatgatttgggtttatcactttcttgttcggttggagggtatccaatacaggggctgatttaatccctgccggtattgggtggatccctgagctgccacccaatccctgtggtgtttcattccctgt

SEQ ID NO: 3614 - DNA, 200 bp, Digitaria sanguinalis
acagggaatgaaacaccacagggattgggtggcagctcagggatccacccaataccggcagggattaaatcagcccctgtattggataccctccaaccgaacaagaaagtgataaacccaaatcatgggtaggaatcccaccccaataaacccaaatcatggtctgacacgaaacacaaattaaagaaggtccgtcgggc

SEQ ID NO: 3615 - DNA, 200 bp, Digitaria sanguinalis
atccctgtggtgtttcattccctgttagcactaatcccctctcctcccttttcttgttcggttacccaccatggatcagaagacgcaacaagtgatggtaacaggtagaaacatacatatccctttcctggacagaagatcatacgcaatatggcaagctcatacacaataagaagactacctggtcaattgtttcctgg

SEQ ID NO: 3616 - DNA, 200 bp, Digitaria sanguinalis
ccaggaaacaattgaccaggtagtcttcttattgtgtatgagcttgccatattgcgtatgatcttctgtccaggaaagggatatgtatgtttctacctgttaccatcacttgttgcgtcttctgatccatggtgggtaaccgaacaagaaaagggaggagaggggattagtgctaacagggaatgaaacaccacagggat

SEQ ID NO: 3617 - DNA, 200 bp, Digitaria sanguinalis
gactacctggtcaattgtttcctggacagaagtgcatacataactccaccaaagactgacaacagggtaatcatgaccatcaagtttgcagactaaccaacaatcgttaagtaccaagcaatctatgatcatggaactatagcattgtttgcccctaattctaaccagccaaaaatccaagactactcaactgttagaac

SEQ ID NO: 3618 - DNA, 200 bp, Digitaria sanguinalis
gttctaacagttgagtagtcttggatttttggctggttagaattaggggcaaacaatgctatagttccatgatcatagattgcttggtacttaacgattgttggttagtctgcaaacttgatggtcatgattaccctgttgtcagtctttggtggagttatgtatgcacttctgtccaggaaacaattgaccaggtagtc

SEQ ID NO: 3619 - DNA, 200 bp, Euphorbia heterophylla
aaaattaaagaactaataaatgataataatgacgattacaaactacaaaagtttgaacaaactaaataatcaattaaaaatactaaaattaagaaggtaattacttcgtaaaaattataaatttggctaaaatattttaaattttacttgagacttgagaatataattaattagtcgaaattggacctaaataataaaga

SEQ ID NO: 3620 - DNA, 200 bp, Euphorbia heterophylla
tctttattatttaggtccaatttcgactaattaattatattctcaagtctcaagtaaaatttaaaatattttagccaaatttataatttttacgaagtaattaccttcttaattttagtatttttaattgattatttagtttgttcaaacttttgtagtttgtaatcgtcattattatcatttattagttctttaatttt

SEQ ID NO: 3621 - DNA, 200 bp, Euphorbia heterophylla
cgaaattggacctaaataataaagaaaaactacacttaataatcactcataatataaactcaacaaacacaaggtctcgaacataacaataatataaacattaagaatctaataagtactacatattatacaaatttataaactctttgctttattcttttttaatctcttctgtcaaatatttattttgcaatatatac

SEQ ID NO: 3622 - DNA, 200 bp, Euphorbia heterophylla
gtatatattgcaaaataaatatttgacagaagagattaaaaaagaataaagcaaagagtttataaatttgtataatatgtagtacttattagattcttaatgtttatattattgttatgttcgagaccttgtgtttgttgagtttatattatgagtgattattaagtgtagtttttctttattatttaggtccaatttcg

SEQ ID NO: 3623 - DNA, 200 bp, Euphorbia heterophylla
caaatatttattttgcaatatatacttttaaattttgttaattaatttggtttggtttttatcatgaaaaccgaaaattgaaccaaaaccaaaccaaaaccaaagtattagaattttacaaatcaaaaccaaaccctatagatacataagaacaaacaataaatatgttatatcctaataaatcgatttgattttcttat

SEQ ID NO: 3624 - DNA, 200 bp, Euphorbia heterophylla
ataagaaaatcaaatcgatttattaggatataacatatttattgtttgttcttatgtatctatagggtttggttttgatttgtaaaattctaatactttggttttggtttggttttggttcaattttcggttttcatgataaaaaccaaaccaaattaattaacaaaatttaaaagtatatattgcaaaataaatatttg

SEQ ID NO: 3625 - DNA, 200 bp, Euphorbia heterophylla
taataaatcgatttgattttcttattgttaagataaaaaatgcaaaatcacatattacaaatcacaagagaaaaataatagaaggaaaagaaaagaaaacgcaagaatgaacccatattcacgaacaacgatctctattgagagaaaatgatagcgaattctggttgaatgagctgcaagtaatctttcctaatttgtag

SEQ ID NO: 3626 - DNA, 200 bp, Euphorbia heterophylla
ctacaaattaggaaagattacttgcagctcattcaaccagaattcgctatcattttctctcaatagagatcgttgttcgtgaatatgggttcattcttgcgttttcttttcttttccttctattatttttctcttgtgatttgtaatatgtgattttgcattttttatcttaacaataagaaaatcaaatcgatttatta

SEQ ID NO: 3627 - DNA, 200 bp, Euphorbia heterophylla
gcaagtaatctttcctaatttgtaggttcgcatattttgcttaattagtttgtcaattattttgttttaaagacgcgtgtttctttgttttcaattataagtgcaatttcatattgtttccattaaggtgtaaggtatggttactttattttttttcaaaataaatcatactttacctcttaacacaattggatcaaaat

SEQ ID NO: 3628 - DNA, 200 bp, Euphorbia heterophylla
attttgatccaattgtgttaagaggtaaagtatgatttattttgaaaaaaaataaagtaaccataccttacaccttaatggaaacaatatgaaattgcacttataattgaaaacaaagaaacacgcgtctttaaaacaaaataattgacaaactaattaagcaaaatatgcgaacctacaaattaggaaagattacttgc

SEQ ID NO: 3629 - DNA, 200 bp, Euphorbia heterophylla
cctcttaacacaattggatcaaaatagcaaccattcatcttatggtgatagaaacaacataaaaattacttcggataaccatataatttccctttcattaattatcaattaattatcgatggtcaaaagatcaatatctaagttgttttataaaaaatttaggagtttttaacaatttgatgtacgaatgttatattttg

SEQ ID NO: 3630 - DNA, 200 bp, Euphorbia heterophylla
caaaatataacattcgtacatcaaattgttaaaaactcctaaattttttataaaacaacttagatattgatcttttgaccatcgataattaattgataattaatgaaagggaaattatatggttatccgaagtaatttttatgttgtttctatcaccataagatgaatggttgctattttgatccaattgtgttaagagg

SEQ ID NO: 3631 - DNA, 200 bp, Euphorbia heterophylla
tttgatgtacgaatgttatattttgaaaatattatttaattttgttaatcatttcccattcttctctgtttctctttagctctcaaatctctccttggcacactctcagtctaatggccgccgcaacaattcaaaccttcaaaacctcttctttcccttccacatcttctgcttcaattgcttctcttggcatagccaac

SEQ ID NO: 3632 - DNA, 200 bp, Euphorbia heterophylla
gttggctatgccaagagaagcaattgaagcagaagatgtggaagggaaagaagaggttttgaaggtttgaattgttgcggcggccattagactgagagtgtgccaaggagagatttgagagctaaagagaaacagagaagaatgggaaatgattaacaaaattaaataatattttcaaaatataacattcgtacatcaaa

SEQ ID NO: 3633 - DNA, 200 bp, Euphorbia heterophylla
aattgcttctcttggcatagccaactcctcaattacgatacccctctccaaattcacttccaagcataatttttccaaaaaatctctcaaggtctctgctaccgctgctgatgatgacggaaaaatttcccatacccctttccccaataacggctctctccctccaaggcccgtgtcaaagtacgttgctcgctaattca

SEQ ID NO: 3634 - DNA, 200 bp, Euphorbia heterophylla
tgaattagcgagcaacgtactttgacacgggccttggagggagagagccgttattggggaaaggggtatgggaaatttttccgtcatcatcagcagcggtagcagagaccttgagagattttttggaaaaattatgcttggaagtgaatttggagaggggtatcgtaattgaggagttggctatgccaagagaagcaatt

SEQ ID NO: 3635 - DNA, 200 bp, Euphorbia heterophylla
tcaaagtacgttgctcgctaattcactgcttaaagcttgtttcttttgaacttatgtgatcatatatgggcactctgccatctggtttaatttgggggtttttccttttgacggaatttgaacatttaaaattgaggggtcatcaaattaagctttgggatttctcaatttcacatgtattttagtgattgttcgttatt

SEQ ID NO: 3636 - DNA, 200 bp, Euphorbia heterophylla
aataacgaacaatcactaaaatacatgtgaaattgagaaatcccaaagcttaatttgatgacccctcaattttaaatgttcaaattccgtcaaaaggaaaaacccccaaattaaaccagatggcagagtgcccatatatgatcacataagttcaaaagaaacaagctttaagcagtgaattagcgagcaacgtactttga

SEQ ID NO: 3637 - DNA, 200 bp, Euphorbia heterophylla
tgtattttagtgattgttcgttattgattgattattgtttgttgcacattgtgatgggatttagggttaggcggcatacgatttctgtgtttgttggagatgagagtggaatgatcaatcgcattgctggggtttttgcgagaaggggatataacattgagtcccttgctgtgggtcttaataaggacaaggcgcttttc

SEQ ID NO: 3638 - DNA, 200 bp, Euphorbia heterophylla
gaaaagcgccttgtccttattaagacccacagcaagggactcaatgttatatccccttctcgcaaaaaccccagcaatgcgattgatcattccactctcatctccaacaaacacagaaatcgtatgccgcctaaccctaaatcccatcacaatgtgcaacaaacaataatcaatcaataacgaacaatcactaaaataca

SEQ ID NO: 3639 - DNA, 200 bp, Euphorbia heterophylla
tcttaataaggacaaggcgcttttcactatagttgtctctggaactgaaagggtgttacaacaagttatggagcagttgcagaaacttgttaatgttttgaaggttgtattcttatttcgagggagtccctttatctactgattttagttttatagttataattgttggcacatagtccagttgaagagaaatggatact

SEQ ID NO: 3640 - DNA, 200 bp, Euphorbia heterophylla
agtatccatttctcttcaactggactatgtgccaacaattataactataaaactaaaatcagtagataaagggactccctcgaaataagaatacaaccttcaaaacattaacaagtttctgcaactgctccataacttgttgtaacaccctttcagttccagagacaactatagtgaaaagcgccttgtccttattaaga

SEQ ID NO: 3641 - DNA, 200 bp, Euphorbia heterophylla
gtccagttgaagagaaatggatactggatatatagaagagacagatttctatttgcctattttcatattatggcttttgttacattgttcggattgtaatttctccatatgctgttgtttactatgatatttaggttgaggacctatcgtccgagccacaggtagaacgtgagctaatgcttattaaactgaaggcagat

SEQ ID NO: 3642 - DNA, 200 bp, Euphorbia heterophylla
atctgccttcagtttaataagcattagctcacgttctacctgtggctcggacgataggtcctcaacctaaatatcatagtaaacaacagcatatggagaaattacaatccgaacaatgtaacaaaagccataatatgaaaataggcaaatagaaatctgtctcttctatatatccagtatccatttctcttcaactggac

SEQ ID NO: 3643 - DNA, 200 bp, Euphorbia heterophylla
aatgcttattaaactgaaggcagatgctaataaccgtgctgaggtaactggattttcatcgttgttgagtatggaaatgctttgaggattccaatttgaattgctcccttgtttttctcggctacattttgttcttcggtgtgattttcagattatgtggttggtggacatcttcagagcaaaaatagtggacatctctg

SEQ ID NO: 3644 - DNA, 200 bp, Euphorbia heterophylla
cagagatgtccactatttttgctctgaagatgtccaccaaccacataatctgaaaatcacaccgaagaacaaaatgtagccgagaaaaacaagggagcaattcaaattggaatcctcaaagcatttccatactcaacaacgatgaaaatccagttacctcagcacggttattagcatctgccttcagtttaataagcatt

SEQ ID NO: 3645 - DNA, 200 bp, Euphorbia heterophylla
ataggatctgataaatttctgttccgttgttcatcagaagaattttttttttactatgagctcaaattaagaaataaagcataaatgtcagggtttttatgtaaaaacaactgaaatatacaacttatgaaggagggtttgtgatctgtgtgtatgccaggtgattgtcacttaagtagtataaaagttcatagcatgca

SEQ ID NO: 3646 - DNA, 200 bp, Euphorbia heterophylla
tgcatgctatgaacttttatactacttaagtgacaatcacctggcatacacacagatcacaaaccctccttcataagttgtatatttcagttgtttttacataaaaaccctgacatttatgctttatttcttaatttgagctcatagtaaaaaaaaaattcttctgatgaacaacggaacagaaatttatcagatcctat

SEQ ID NO: 3647 - DNA, 200 bp, Euphorbia heterophylla
gtagtataaaagttcatagcatgcaaaatcaagactactatatgttctttttaaatgtgtgtactatgctatggcaaatagccttgtaatgaagcttgaattagcactaatatagattgctctaagacgggaaaggatgggcgagacagcgccgttctggaggttttctgcagcttcctatccggaccttgaaagtatgc

SEQ ID NO: 3648 - DNA, 200 bp, Euphorbia heterophylla
gcatactttcaaggtccggataggaagctgcagaaaacctccagaacggcgctgtctcgcccatcctttcccgtcttagagcaatctatattagtgctaattcaagcttcattacaaggctatttgccatagcatagtacacacatttaaaaagaacatatagtagtcttgattttgcatgctatgaacttttatactac

SEQ ID NO: 3649 - DNA, 200 bp, Euphorbia heterophylla
tcctatccggaccttgaaagtatgcaacctggtgcagttgaaaatgtgcaacctgctggtgcctcacccggtagtcctgctactaattttacagagaattcaaatggttccattaatggcagaaccatctcatcttcaaaggtttattatactttaatatattatttggtcgatctaatatcttattagatatgtccaat

SEQ ID NO: 3650 - DNA, 200 bp, Euphorbia heterophylla
attggacatatctaataagatattagatcgaccaaataatatattaaagtataataaacctttgaagatgagatggttctgccattaatggaaccatttgaattctctgtaaaattagtagcaggactaccgggtgaggcaccagcaggttgcacattttcaactgcaccaggttgcatactttcaaggtccggatagga

SEQ ID NO: 3651 - DNA, 200 bp, Euphorbia heterophylla
taatatcttattagatatgtccaatattatttgtgcactaccatgccttgaatatgccatgtcttgaatgaaacttttagtacatctacatggagatgtgtacaatactactgatctgaattattattaatacactagatacagttaatcatcagatagcatcatgtgtttagtatcttctgtagaaagataaagtgtgc

SEQ ID NO: 3652 - DNA, 200 bp, Euphorbia heterophylla
gcacactttatctttctacagaagatactaaacacatgatgctatctgatgattaactgtatctagtgtattaataataattcagatcagtagtattgtacacatctccatgtagatgtactaaaagtttcattcaagacatggcatattcaaggcatggtagtgcacaaataatattggacatatctaataagatatta

SEQ ID NO: 3653 - DNA, 200 bp, Euphorbia heterophylla
tcttctgtagaaagataaagtgtgcttgaatgaagataaataataccttaattgaatggttcggaagaagagcttgctgttatttgtcgaggatatattttttctatattgtctgcttgtctgtgttctgggatggccatccatttgactgcaagttatattaccatgatgatcatgaataaggatcaaataatatccgg

SEQ ID NO: 3654 - DNA, 200 bp, Euphorbia heterophylla
ccggatattatttgatccttattcatgatcatcatggtaatataacttgcagtcaaatggatggccatcccagaacacagacaagcagacaatatagaaaaaatatatcctcgacaaataacagcaagctcttcttccgaaccattcaattaaggtattatttatcttcattcaagcacactttatctttctacagaaga

SEQ ID NO: 3655 - DNA, 200 bp, Euphorbia heterophylla
tgaataaggatcaaataatatccggttgcaactattctcccgtttttacttttaggaaagataatttagttgatatttaaacctttctgatgcaatagttgtcaaaagctcttatcctgctcaagcctcattgccacctgccaggttcctcacatgcaaaagatccgcacctagatgctctaggcttttggtgctatagg

SEQ ID NO: 3656 - DNA, 200 bp, Euphorbia heterophylla
cctatagcaccaaaagcctagagcatctaggtgcggatcttttgcatgtgaggaacctggcaggtggcaatgaggcttgagcaggataagagcttttgacaactattgcatcagaaaggtttaaatatcaactaaattatctttcctaaaagtaaaaacgggagaatagttgcaaccggatattatttgatccttattca

SEQ ID NO: 3657 - DNA, 200 bp, Euphorbia heterophylla
tgctctaggcttttggtgctataggctctaggtgctctaggcgtgcgcctcacaccaaaattaagttgtttttggaaatataacaatttaggtgagtttagactttatggtaaaaacataattaggaaatagaaattaagaaagaaaaatccggaaaggaaaaatatttttgtatggaaaatattaattatggaggaaca

SEQ ID NO: 3658 - DNA, 200 bp, Euphorbia heterophylla
tgttcctccataattaatattttccatacaaaaatatttttcctttccggatttttctttcttaatttctatttcctaattatgtttttaccataaagtctaaactcacctaaattgttatatttccaaaaacaacttaattttggtgtgaggcgcacgcctagagcacctagagcctatagcaccaaaagcctagagca

SEQ ID NO: 3659 - DNA, 200 bp, Euphorbia heterophylla
ggaaaatattaattatggaggaacaaaagttaggaaatggaacaataaaaatgaggaaattagagaaactacgaaaaaaattaaaataaggaagaaaatagaattgagtgagagaaataggtatgaaaagaaaagaaagacacttggatgttgatttcacaatcagctactaaactactaataaggcattaaaataacta

SEQ ID NO: 3660 - DNA, 200 bp, Euphorbia heterophylla
tagttattttaatgccttattagtagtttagtagctgattgtgaaatcaacatccaagtgtctttcttttcttttcatacctatttctctcactcaattctattttcttccttattttaatttttttcgtagtttctctaatttcctcatttttattgttccatttcctaacttttgttcctccataattaatattttcc

SEQ ID NO: 3661 - DNA, 200 bp, Euphorbia heterophylla
tactaataaggcattaaaataactatttaggtccttacacaattttttaactgcaacgtatatatatacagcaaatttacggtgcttcttaattttttagctattgaaattcaatttatttatagttcatttacccccttacgcctagtatgcgccttaacaattgatttgtgtatatggtttcttatttttactctaca

SEQ ID NO: 3662 - DNA, 200 bp, Euphorbia heterophylla
tgtagagtaaaaataagaaaccatatacacaaatcaattgttaaggcgcatactaggcgtaagggggtaaatgaactataaataaattgaatttcaatagctaaaaaattaagaagcaccgtaaatttgctgtatatatatacgttgcagttaaaaaattgtgtaaggacctaaatagttattttaatgccttattagta

SEQ ID NO: 3663 - DNA, 200 bp, Euphorbia heterophylla
tatggtttcttatttttactctacagaacttgtattctaattccatttgtttaatgaacttgaactcacgtgtatggctaaatctgtatgttaattttcaatttaatttagttctcctttaacttgtgtgtgtgataattttgcattatattgttacattattaaaggcttacttcttgtttatgccttctcaatctaag

SEQ ID NO: 3664 - DNA, 200 bp, Euphorbia heterophylla
cttagattgagaaggcataaacaagaagtaagcctttaataatgtaacaatataatgcaaaattatcacacacacaagttaaaggagaactaaattaaattgaaaattaacatacagatttagccatacacgtgagttcaagttcattaaacaaatggaattagaatacaagttctgtagagtaaaaataagaaaccata

SEQ ID NO: 3665 - DNA, 200 bp, Euphorbia heterophylla
cttgtttatgccttctcaatctaagggtgacgtatatcctgtggagccttatgatgaattctctgtgcatcaagttctcgatgctcattggggagttctctatgatgaagatgtaagacatgttcaaagtgatcagtttctatattgcttcatctttcattatcatgttactttccatgattgaacatcacatgctctat

SEQ ID NO: 3666 - DNA, 200 bp, Euphorbia heterophylla
atagagcatgtgatgttcaatcatggaaagtaacatgataatgaaagatgaagcaatatagaaactgatcactttgaacatgtcttacatcttcatcatagagaactccccaatgagcatcgagaacttgatgcacagagaattcatcataaggctccacaggatatacgtcacccttagattgagaaggcataaacaag

SEQ ID NO: 3667 - DNA, 200 bp, Euphorbia heterophylla
catgattgaacatcacatgctctattattaaaaataggaaattttgttggctttgttttctgtaacttaatttggaagttgtaatataattattttacgaggtaggtataattaagtggatagcataggctatagttatctcacctttcattctcatattgactttatatttcctttgttgttttcaattcagtctagtg

SEQ ID NO: 3668 - DNA, 200 bp, Euphorbia heterophylla
cactagactgaattgaaaacaacaaaggaaatataaagtcaatatgagaatgaaaggtgagataactatagcctatgctatccacttaattatacctacctcgtaaaataattatattacaacttccaaattaagttacagaaaacaaagccaacaaaatttcctatttttaataatagagcatgtgatgttcaatcatg

SEQ ID NO: 3669 - DNA, 200 bp, Euphorbia heterophylla
ttgttgttttcaattcagtctagtggacttcgatcacatacgttatccatacttgtgaatgattctcctggtgttctcaacacgattaccggggttatgtctcggcgaggttataacatccaggtctgcatatttcatgttcatctctatttttcttccaaaatgtttagtgacttgtcattgttgttattgtttttttt

SEQ ID NO: 3670 - DNA, 200 bp, Euphorbia heterophylla
aaaaaaaacaataacaacaatgacaagtcactaaacattttggaagaaaaatagagatgaacatgaaatatgcagacctggatgttataacctcgccgagacataaccccggtaatcgtgttgagaacaccaggagaatcattcacaagtatggataacgtatgtgatcgaagtccactagactgaattgaaaacaacaa

SEQ ID NO: 3671 - DNA, 200 bp, Euphorbia heterophylla
tgtcattgttgttattgttttttttcactttaatctattagagtcttgctgtgggtcgagctgagagagagggactttctcgcattacaactgttatccttggaaatgatgatacagttagaaagttggttctgcaacttcacaagttgattgatatacatgaggtaagtggtggtgaaattaactttttccctcatatt

SEQ ID NO: 3672 - DNA, 200 bp, Euphorbia heterophylla
aatatgagggaaaaagttaatttcaccaccacttacctcatgtatatcaatcaacttgtgaagttgcagaaccaactttctaactgtatcatcatttccaaggataacagttgtaatgcgagaaagtccctctctctcagctcgacccacagcaagactctaatagattaaagtgaaaaaaaacaataacaacaatgaca

SEQ ID NO: 3673 - DNA, 200 bp, Euphorbia heterophylla
tgaaattaactttttccctcatatttgtaagtgcataatcaagcaacatgtgacattataagaaagggaaaactaggaagaaaaatttgacgaatacagtgactggcttttatgatatccaagttgaaactgcagttttcttgtgagatagtttgagcattttgtcctataaggctgtaactgtttggaagaacctggaa

SEQ ID NO: 3674 - DNA, 200 bp, Euphorbia heterophylla
ttccaggttcttccaaacagttacagccttataggacaaaatgctcaaactatctcacaagaaaactgcagtttcaacttggatatcataaaagccagtcactgtattcgtcaaatttttcttcctagttttccctttcttataatgtcacatgttgcttgattatgcacttacaaatatgagggaaaaagttaatttca

SEQ ID NO: 3675 - DNA, 200 bp, Euphorbia heterophylla
tgtaactgtttggaagaacctggaacaaatttaagcttcagtgtcgtacaatgtcatggtctatatgtttgctaatgatttattcttgaggagtaggcataatttaaaatattattgaagtataatcttgtacccatactttggtgatccgcccatgataattatacttcatgtcatgcttattttctttccaaataaag

SEQ ID NO: 3676 - DNA, 200 bp, Euphorbia heterophylla
ctttatttggaaagaaaataagcatgacatgaagtataattatcatgggcggatcaccaaagtatgggtacaagattatacttcaataatattttaaattatgcctactcctcaagaataaatcattagcaaacatatagaccatgacattgtacgacactgaagcttaaatttgttccaggttcttccaaacagttaca

SEQ ID NO: 3677 - DNA, 200 bp, Euphorbia heterophylla
atgcttattttctttccaaataaagaatctaaagttttattatttaactatggtgtatctccacagagtaatttgtgtgtgtgtgtgtgtcttttgtttttgacaaattcatgacccatttgagtgaatggataactatggtgggtgcttgattcaggtacaagatattacacatttgccatttgcagagcgagagttaa

SEQ ID NO: 3678 - DNA, 200 bp, Euphorbia heterophylla
ttaactctcgctctgcaaatggcaaatgtgtaatatcttgtacctgaatcaagcacccaccatagttatccattcactcaaatgggtcatgaatttgtcaaaaacaaaagacacacacacacacacaaattactctgtggagatacaccatagttaaataataaaactttagattctttatttggaaagaaaataagcat

SEQ ID NO: 3679 - DNA, 200 bp, Euphorbia heterophylla
ttgccatttgcagagcgagagttaatgctgataaaggtggcagtcaatactgcagccaggagagatgtcctagatattgctagcatatttcgggccaaagctgttgatgtgtctgaccacacaattaccctagaggtagtggcttcctatgcttgaatgattagctggcttgctctttgctaatataatttcacaactca

SEQ ID NO: 3680 - DNA, 200 bp, Euphorbia heterophylla
tgagttgtgaaattatattagcaaagagcaagccagctaatcattcaagcataggaagccactacctctagggtaattgtgtggtcagacacatcaacagctttggcccgaaatatgctagcaatatctaggacatctctcctggctgcagtattgactgccacctttatcagcattaactctcgctctgcaaatggcaa

SEQ ID NO: 3681 - DNA, 200 bp, Euphorbia heterophylla
tttgctaatataatttcacaactcaataatgatcatgattcacgagccaatatcaggctatgctcttgagttctctctatgtgtttttagtgaagttgagttattttgtttgtttgatctttttttattattggcgtggcaagttcaaatctataccctctaactggcttgaaatttgagttcccttttttctttgtgct

SEQ ID NO: 3682 - DNA, 200 bp, Euphorbia heterophylla
agcacaaagaaaaaagggaactcaaatttcaagccagttagagggtatagatttgaacttgccacgccaataataaaaaaagatcaaacaaacaaaataactcaacttcactaaaaacacatagagagaactcaagagcatagcctgatattggctcgtgaatcatgatcattattgagttgtgaaattatattagcaaa

SEQ ID NO: 3683 - DNA, 200 bp, Euphorbia heterophylla
ttgagttcccttttttctttgtgctacggcagtttatgcacgcagtcacaatatattccgttagatgtctagtataactgtgtgaagtttgaagtattgatgatagaattggatggtatgtgattttgatttttcgacaatgcacttcatatggtagccggccccatttagcatgggatattaagggtttgctgttgttg

SEQ ID NO: 3684 - DNA, 200 bp, Euphorbia heterophylla
caacaacagcaaacccttaatatcccatgctaaatggggccggctaccatatgaagtgcattgtcgaaaaatcaaaatcacataccatccaattctatcatcaatacttcaaacttcacacagttatactagacatctaacggaatatattgtgactgcgtgcataaactgccgtagcacaaagaaaaaagggaactcaa

SEQ ID NO: 3685 - DNA, 200 bp, Euphorbia heterophylla
ggatattaagggtttgctgttgttgttgcacttccaccaaggaagagcttgatgcctattgatgcctttttctatcatctccatcagtagctgttgttggttttccaaattttatgacttcactgattatgttatcatttgatagcttactggtgatttaacaaagatggcggccctgcagaaactattagagccatatg

SEQ ID NO: 3686 - DNA, 200 bp, Euphorbia heterophylla
catatggctctaatagtttctgcagggccgccatctttgttaaatcaccagtaagctatcaaatgataacataatcagtgaagtcataaaatttggaaaaccaacaacagctactgatggagatgatagaaaaaggcatcaataggcatcaagctcttccttggtggaagtgcaacaacaacagcaaacccttaatatcc

SEQ ID NO: 3687 - DNA, 200 bp, Euphorbia heterophylla
ctgcagaaactattagagccatatgggatttgtgaggtcagtcatttcctgccaagtttcaacaagtaaagatgtttgtttgcctatgtttctctaaacattgacaatctttgtttattttgtcaatttctgtttttatgtttacaccaggttctttatagtatatatgttcagaacagaagttttttaaatctgttcca

SEQ ID NO: 3688 - DNA, 200 bp, Euphorbia heterophylla
tggaacagatttaaaaaacttctgttctgaacatatatactataaagaacctggtgtaaacataaaaacagaaattgacaaaataaacaaagattgtcaatgtttagagaaacataggcaaacaaacatctttacttgttgaaacttggcaggaaatgactgacctcacaaatcccatatggctctaatagtttctgcag

SEQ ID NO: 3689 - DNA, 200 bp, Euphorbia heterophylla
acagaagttttttaaatctgttccactaacttggcatgtaaagctggatgccactgtgaactttcaaaagttccaacccttgaacttggcaaaagtgtatcagtttgccccctcattgccatgcgtcagcttttgattggagaaaggaagttcagaacaatgacatatttgaaaactcaaaccaattagaagctgacacg

SEQ ID NO: 3690 - DNA, 200 bp, Euphorbia heterophylla
cgtgtcagcttctaattggtttgagttttcaaatatgtcattgttctgaacttcctttctccaatcaaaagctgacgcatggcaatgagggggcaaactgatacacttttgccaagttcaagggttggaacttttgaaagttcacagtggcatccagctttacatgccaagttagtggaacagatttaaaaaacttctgt

SEQ ID NO: 3691 - DNA, 200 bp, Euphorbia heterophylla
attgttgagtttaaaaatgcaaaattgatataatattttttattatgaaatagatgtagagagtactcataatttagtattttttttaaaaaaatcgaaaccaattcaacttagccgtgtctgaaaatattgaaggtggtttgtttgaaatgagaattaacaaataaaagccggcccaaacccgtcgcaatccgggccag

SEQ ID NO: 3692 - DNA, 200 bp, Euphorbia heterophylla
ctggcccggattgcgacgggtttgggccggcttttatttgttaattctcatttcaaacaaaccaccttcaatattttcagacacggctaagttgaattggtttcgatttttttaaaaaaaatactaaattatgagtactctctacatctatttcataataaaaaatattatatcaattttgcatttttaaactcaacaat

SEQ ID NO: 3693 - DNA, 200 bp, Euphorbia heterophylla
ccaaacccgtcgcaatccgggccaggaacggtggtaataatgaccaattgcttaagaaactcattagcccatattattattttgataaaaggataaaagtaatttacacgcgtgataacgccaaattagcggggacatattagcaaataatttgaaaataattaggaaataattaaagtttaattatgtaaagacaacag

SEQ ID NO: 3694 - DNA, 200 bp, Euphorbia heterophylla
ctgttgtctttacataattaaactttaattatttcctaattattttcaaattatttgctaatatgtccccgctaatttggcgttatcacgcgtgtaaattacttttatccttttatcaaaataataatatgggctaatgagtttcttaagcaattggtcattattaccaccgttcctggcccggattgcgacgggtttgg

SEQ ID NO: 3695 - DNA, 200 bp, Euphorbia heterophylla
aagtttaattatgtaaagacaacagtgtagtccgtagtagatagaagaggcgaaggagaaggtggttagtactggagggcgaaaggacagaagaagcagaaaaatatcacattttaatggtgttttgttgtggtttatcttattgtactgtatgaattgcggcgcttccgccatctgcgtcccctccttaagatctcatt

SEQ ID NO: 3696 - DNA, 200 bp, Euphorbia heterophylla
aatgagatcttaaggaggggacgcagatggcggaagcgccgcaattcatacagtacaataagataaaccacaacaaaacaccattaaaatgtgatatttttctgcttcttctgtcctttcgccctccagtactaaccaccttctccttcgcctcttctatctactacggactacactgttgtctttacataattaaactt

SEQ ID NO: 3697 - DNA, 200 bp, Euphorbia heterophylla
tgcgtcccctccttaagatctcattatcttgttaatcttactaccactacaatcacaatgcctgcggctgctgctctctcatcttcccttgttgccgccgcaccctctcacgattcctctcctttgacaactccttttttaaggagcagcagcagcagctcggccccattcccttttctccggccaaggaccaatgctcc

SEQ ID NO: 3698 - DNA, 200 bp, Euphorbia heterophylla
ggagcattggtccttggccggagaaaagggaatggggccgagctgctgctgctgctccttaaaaaaggagttgtcaaaggagaggaatcgtgagagggtgcggcggcaacaagggaagatgagagagcagcagccgcaggcattgtgattgtagtggtagtaagattaacaagataatgagatcttaaggaggggacgca

SEQ ID NO: 3699 - DNA, 200 bp, Euphorbia heterophylla
ttctccggccaaggaccaatgctcctcttaagctctccgctaccctcatccaccaccccggaaaccaacccgctcttccccccttacctcgctccaagtataagtctcacgcttttcatgcttcttggatttttttctagtattaggctgcaattttatgaacttaactgaagctcaactgtaattgaacttatttcggt

SEQ ID NO: 3700 - DNA, 200 bp, Euphorbia heterophylla
accgaaataagttcaattacagttgagcttcagttaagttcataaaattgcagcctaatactagaaaaaaatccaagaagcatgaaaagcgtgagacttatacttggagcgaggtaaggggggaagagcgggttggtttccggggtggtggatgagggtagcggagagcttaagaggagcattggtccttggccggagaa

SEQ ID NO: 3701 - DNA, 200 bp, Euphorbia heterophylla
caactgtaattgaacttatttcggtacgaatttataactaagcatacctgaactgaaatggatcagtctgattgtattctgagagaacagggccttagtacttccgattccatgtgaaaatgcttctgtcttgttactgctttttatttatgtgtttccttttcttctatattttgaacttcatggcctgatttttatat

SEQ ID NO: 3702 - DNA, 200 bp, Euphorbia heterophylla
atataaaaatcaggccatgaagttcaaaatatagaagaaaaggaaacacataaataaaaagcagtaacaagacagaagcattttcacatggaatcggaagtactaaggccctgttctctcagaatacaatcagactgatccatttcagttcaggtatgcttagttataaattcgtaccgaaataagttcaattacagttg

SEQ ID NO: 3703 - DNA, 200 bp, Euphorbia heterophylla
gaacttcatggcctgatttttatatgatgaatcttatgagttcgttatgatttttgttctaagttgcagggtgcagttgcacacgatatcagtctttgtgggtgatgagagcgggatgataaatagaatagctggcgtttttgctagaaggggttacaacattgagtcccttgctgttggtttgaacaaggacaaggctc

SEQ ID NO: 3704 - DNA, 200 bp, Euphorbia heterophylla
gagccttgtccttgttcaaaccaacagcaagggactcaatgttgtaaccccttctagcaaaaacgccagctattctatttatcatcccgctctcatcacccacaaagactgatatcgtgtgcaactgcaccctgcaacttagaacaaaaatcataacgaactcataagattcatcatataaaaatcaggccatgaagttc

SEQ ID NO: 3705 - DNA, 200 bp, Euphorbia heterophylla
gttggtttgaacaaggacaaggctctttttactattgttgtttccggaactgacaaggttttgcaacaagttatggagcagttgcagaaacttgttaatgttttgaaggttgtattcttatttcgagggagtccctttatctactgattttagttttatggttataattgttggcacatagtccaattgaagagaaatgg

SEQ ID NO: 3706 - DNA, 200 bp, Euphorbia heterophylla
ccatttctcttcaattggactatgtgccaacaattataaccataaaactaaaatcagtagataaagggactccctcgaaataagaatacaaccttcaaaacattaacaagtttctgcaactgctccataacttgttgcaaaaccttgtcagttccggaaacaacaatagtaaaaagagccttgtccttgttcaaaccaac

SEQ ID NO: 3707 - DNA, 200 bp, Euphorbia heterophylla
acatagtccaattgaagagaaatggatactggatatatagaagagacagatttctatttgcctattttcatattatggcttttgttacattgttcggattgtaatttctccatatgctgttgtttactatgatatttaggttgaggatctatcgtccgagccacaggtagaacgtgagctaatgcttattaaactgaagg

SEQ ID NO: 3708 - DNA, 200 bp, Euphorbia heterophylla
ccttcagtttaataagcattagctcacgttctacctgtggctcggacgatagatcctcaacctaaatatcatagtaaacaacagcatatggagaaattacaatccgaacaatgtaacaaaagccataatatgaaaataggcaaatagaaatctgtctcttctatatatccagtatccatttctcttcaattggactatgt

SEQ ID NO: 3709 - DNA, 200 bp, Euphorbia heterophylla
gagctaatgcttattaaactgaaggcagatgctaataaccgtgctgaggtaactggattttcatcgttgttgagtatggaaatgctttgaggattccaatttgaattgctcccttgttttcttcggctacattttgttcttcggtgtgattttcagattatgtggttggtggacatcttcagagcaaaaatagtggacat

SEQ ID NO: 3710 - DNA, 200 bp, Euphorbia heterophylla
atgtccactatttttgctctgaagatgtccaccaaccacataatctgaaaatcacaccgaagaacaaaatgtagccgaagaaaacaagggagcaattcaaattggaatcctcaaagcatttccatactcaacaacgatgaaaatccagttacctcagcacggttattagcatctgccttcagtttaataagcattagctc

SEQ ID NO: 3711 - DNA, 200 bp, Euphorbia heterophylla
tcttcagagcaaaaatagtggacatctctgagcattcagttacaattgaggtaaatgatttgttaattgattccaattctagagataaaaagatcctagtggatgacccctctgatactttaaaaattaaagattattaatagttgtttaataatattgacaaatgaatgaactggaaatattgaacatattgttgttga

SEQ ID NO: 3712 - DNA, 200 bp, Euphorbia heterophylla
tcaacaacaatatgttcaatatttccagttcattcatttgtcaatattattaaacaactattaataatctttaatttttaaagtatcagaggggtcatccactaggatctttttatctctagaattggaatcaattaacaaatcatttacctcaattgtaactgaatgctcagagatgtccactatttttgctctgaaga

SEQ ID NO: 3713 - DNA, 200 bp, Euphorbia heterophylla
gaaatattgaacatattgttgttgaaaagttgtgcatattaattatgaagttaagtttgatgcaaacttgtagctaatcatttttctagtaatttagtttcaatgatagtatcagtgtaatatatgatatgtggaaatttttaagggctttaacatcttaatttttcagcattgctatggagtaataggagttcactttt

SEQ ID NO: 3714 - DNA, 200 bp, Euphorbia heterophylla
aaaagtgaactcctattactccatagcaatgctgaaaaattaagatgttaaagcccttaaaaatttccacatatcatatattacactgatactatcattgaaactaaattactagaaaaatgattagctacaagtttgcatcaaacttaacttcataattaatatgcacaacttttcaacaacaatatgttcaatatttc

SEQ ID NO: 3715 - DNA, 200 bp, Euphorbia heterophylla
tatggagtaataggagttcacttttaactaccaaatatgtttctgttatgattttttaacattgttcctcatttctgatgcttgtgttggtagccatgcttttcatgatatactaattgctatagttgttttagtctttccattacttttacttgtaaaatatattaagtggtatattagtttgttgagcttggtgaacc

SEQ ID NO: 3716 - DNA, 200 bp, Euphorbia heterophylla
ggttcaccaagctcaacaaactaatataccacttaatatattttacaagtaaaagtaatggaaagactaaaacaactatagcaattagtatatcatgaaaagcatggctaccaacacaagcatcagaaatgaggaacaatgttaaaaaatcataacagaaacatatttggtagttaaaagtgaactcctattactccata

SEQ ID NO: 3717 - DNA, 200 bp, Euphorbia heterophylla
attagtttgttgagcttggtgaacctccatattttatttatcttttataccaagtgcccagattgtttgtggtttattatggctatgttttttttcccattgcatggaaaccttggaggcttgaacagaattctagtttatgtacggtagttttgaaaaatgatgtgcgttgaaagtgtagttgaaatttcaaatcaaat

SEQ ID NO: 3718 - DNA, 200 bp, Euphorbia heterophylla
atttgatttgaaatttcaactacactttcaacgcacatcatttttcaaaactaccgtacataaactagaattctgttcaagcctccaaggtttccatgcaatgggaaaaaaaacatagccataataaaccacaaacaatctgggcacttggtataaaagataaataaaatatggaggttcaccaagctcaacaaactaat

SEQ ID NO: 3719 - DNA, 200 bp, Euphorbia heterophylla
gtgtagttgaaatttcaaatcaaatgcaccttttgaaattcctaaaggctaatttattgttattggtttaggtgactggagatccagggaagatggttgctgtcgagagaaacttaagcaagtttggaattagagaaattgcaagaactggaaaggttgtgttcagttttctttttattgtggctgttttgtaggtttta

SEQ ID NO: 3720 - DNA, 200 bp, Euphorbia heterophylla
taaaacctacaaaacagccacaataaaaagaaaactgaacacaacctttccagttcttgcaatttctctaattccaaacttgcttaagtttctctcgacagcaaccatcttccctggatctccagtcacctaaaccaataacaataaattagcctttaggaatttcaaaaggtgcatttgatttgaaatttcaactacac

SEQ ID NO: 3721 - DNA, 200 bp, Euphorbia heterophylla
tattgtggctgttttgtaggttttagtttgccgttgattcgtgagcctgctgttctgaatagattgcattgagaagggaaaaaatgggggcttgtgctccattttggcgattttcagctgcttcatatcccgatcttggagaaacaatgtcgaataattctctcttggaaactaaaagttcagcaattgtaggggaagac

SEQ ID NO: 3722 - DNA, 200 bp, Euphorbia heterophylla
gtcttcccctacaattgctgaacttttagtttccaagagagaattattcgacattgtttctccaagatcgggatatgaagcagctgaaaatcgccaaaatggagcacaagcccccattttttcccttctcaatgcaatctattcagaacagcaggctcacgaatcaacggcaaactaaaacctacaaaacagccacaata

SEQ ID NO: 3723 - DNA, 200 bp, Euphorbia heterophylla
aagttcagcaattgtaggggaagacaccacatcttcaggggtatgtcaatgtcaagtttttattttctttgtttggtgttttttcgagactatctgaaaaattacaactttatgagcaaatccagggagatgtgtatccagtggaatcgtctgatagctttaccgtaactcaagttctcgatgctcattggggtgtcctc

SEQ ID NO: 3724 - DNA, 200 bp, Euphorbia heterophylla
gaggacaccccaatgagcatcgagaacttgagttacggtaaagctatcagacgattccactggatacacatctccctggatttgctcataaagttgtaatttttcagatagtctcgaaaaaacaccaaacaaagaaaataaaaacttgacattgacatacccctgaagatgtggtgtcttcccctacaattgctgaactt

SEQ ID NO: 3725 - DNA, 200 bp, Euphorbia heterophylla
tctcgatgctcattggggtgtcctcaatgaggaagatgtaggtctgcttattttcaattccatctttttttttccggtcttatagagcgcacattaatttgtcgagtatttcagacaactggacttcgatcccacactctatctatggtagtaaatgactctcctggagttctcaacatcgtgacaggggtatttgctcg

SEQ ID NO: 3726 - DNA, 200 bp, Euphorbia heterophylla
cgagcaaatacccctgtcacgatgttgagaactccaggagagtcatttactaccatagatagagtgtgggatcgaagtccagttgtctgaaatactcgacaaattaatgtgcgctctataagaccggaaaaaaaaagatggaattgaaaataagcagacctacatcttcctcattgaggacaccccaatgagcatcgaga

SEQ ID NO: 3727 - DNA, 200 bp, Euphorbia heterophylla
acatcgtgacaggggtatttgctcgaaggggctataacattcaggtatttcttatgactttcttctctggtttgaccttgtttcccttaatcctagaatggattgaagaacaaatgattttctcgtctttggcggcagagtttggcagttgggcattcagaaattgaggggcgctcacgaattacaactgtggttcctgg

SEQ ID NO: 3728 - DNA, 200 bp, Euphorbia heterophylla
ccaggaaccacagttgtaattcgtgagcgcccctcaatttctgaatgcccaactgccaaactctgccgccaaagacgagaaaatcatttgttcttcaatccattctaggattaagggaaacaaggtcaaaccagagaagaaagtcataagaaatacctgaatgttatagccccttcgagcaaatacccctgtcacgatgt

SEQ ID NO: 3729 - DNA, 200 bp, Euphorbia heterophylla
cacgaattacaactgtggttcctggtactgatgaatcaattagcaagttggtgcagcaactttacaagctaatagagctccacgaggtcagaaaacttcaccaacaagtgtcaatttttttgagtaaataatgtgttttgtgttttgatgtaatattctattgttttgaaacaaaatgcctctattaccaatctaatgtc

SEQ ID NO: 3730 - DNA, 200 bp, Euphorbia heterophylla
gacattagattggtaatagaggcattttgtttcaaaacaatagaatattacatcaaaacacaaaacacattatttactcaaaaaaattgacacttgttggtgaagttttctgacctcgtggagctctattagcttgtaaagttgctgcaccaacttgctaattgattcatcagtaccaggaaccacagttgtaattcgtg

SEQ ID NO: 3731 - DNA, 200 bp, Euphorbia heterophylla
atgcctctattaccaatctaatgtctcggagaaaaaagaactttttggtccctgtgctataaactttttggccatttggtccatgtggtatacacttgacctttttgctccctattctatgcaatatattacctttttgtccagatgttttcaatcattattcattacccatttggtccatgtgcaatgcaatttgttta

SEQ ID NO: 3732 - DNA, 200 bp, Euphorbia heterophylla
taaacaaattgcattgcacatggaccaaatgggtaatgaataatgattgaaaacatctggacaaaaaggtaatatattgcatagaatagggagcaaaaaggtcaagtgtataccacatggaccaaatggccaaaaagtttatagcacagggaccaaaaagttcttttttctccgagacattagattggtaatagaggcat

SEQ ID NO: 3733 - DNA, 200 bp, Euphorbia heterophylla
gtccatgtgcaatgcaatttgtttatctttgtggaccttgttcgatagagacttaattagtgatatgtcacatattatgtactagagggacaaaaaaggtaacaaattgaatagcacagggactaaataggtaacatgtatatcaccaaaaggacaaactgatgatacaacgaggctcgaaaaggtctttttgccaatat

SEQ ID NO: 3734 - DNA, 200 bp, Euphorbia heterophylla
atattggcaaaaagaccttttcgagcctcgttgtatcatcagtttgtccttttggtgatatacatgttacctatttagtccctgtgctattcaatttgttaccttttttgtccctctagtacataatatgtgacatatcactaattaagtctctatcgaacaaggtccacaaagataaacaaattgcattgcacatggac

SEQ ID NO: 3735 - DNA, 200 bp, Euphorbia heterophylla
ctcgaaaaggtctttttgccaatatctcagcctttgaaggttgaatcttgtatttggtatatatatatatatttatataaaggtcttcaatcttgtaaatggtgacttgtccaggttcgggatcttacccacttgccatttgctgaacgagagttgatgctgataaaaattgcggtgaatgctgctgcacggcgtgatgt

SEQ ID NO: 3736 - DNA, 200 bp, Euphorbia heterophylla
acatcacgccgtgcagcagcattcaccgcaatttttatcagcatcaactctcgttcagcaaatggcaagtgggtaagatcccgaacctggacaagtcaccatttacaagattgaagacctttatataaatatatatatatataccaaatacaagattcaaccttcaaaggctgagatattggcaaaaagaccttttcgag

SEQ ID NO: 3737 - DNA, 200 bp, Euphorbia heterophylla
tgaatgctgctgcacggcgtgatgtcctcgacattgccagcatattcagagcaagagccattgatgtatcggaccacacaataactctcgaggtaattttcacattatcttgtcattgtgtttagccgacaatatgctcaaacttatcgccttttttcatccctggctgatgattttgctttgaattctgtttccagctt

SEQ ID NO: 3738 - DNA, 200 bp, Euphorbia heterophylla
aagctggaaacagaattcaaagcaaaatcatcagccagggatgaaaaaaggcgataagtttgagcatattgtcggctaaacacaatgacaagataatgtgaaaattacctcgagagttattgtgtggtccgatacatcaatggctcttgctctgaatatgctggcaatgtcgaggacatcacgccgtgcagcagcattca

SEQ ID NO: 3739 - DNA, 200 bp, Euphorbia heterophylla
ttgctttgaattctgtttccagcttaccggagatctcgacaagatggtcgcattgcaaaggttgttggaaccctatggcatttgcgaggtttgtggttaaaactgtctcttccttatgccataacatctttttaaaaattatatctttaattctttatctttttataggtggcaagaacagggcgaatagcattggttcg

SEQ ID NO: 3740 - DNA, 200 bp, Euphorbia heterophylla
cgaaccaatgctattcgccctgttcttgccacctataaaaagataaagaattaaagatataatttttaaaaagatgttatggcataaggaagagacagttttaaccacaaacctcgcaaatgccatagggttccaacaacctttgcaatgcgaccatcttgtcgagatctccggtaagctggaaacagaattcaaagcaa

SEQ ID NO: 3741 - DNA, 200 bp, Euphorbia heterophylla
gaacagggcgaatagcattggttcgagagtctggtgtggattctaattatctccgtggatactcgtttcctatataataaataggccacacttgttatggtaatccccgagtttaaactggcttttggcttttggcttttgtatcagtgttaacagttgagtgctctagacacattgttttatttctttttcatacacaa

SEQ ID NO: 3742 - DNA, 200 bp, Euphorbia heterophylla
ttgtgtatgaaaaagaaataaaacaatgtgtctagagcactcaactgttaacactgatacaaaagccaaaagccaaaagccagtttaaactcggggattaccataacaagtgtggcctatttattatataggaaacgagtatccacggagataattagaatccacaccagactctcgaaccaatgctattcgccctgttc

SEQ ID NO: 3743 - DNA, 200 bp, Euphorbia heterophylla
tgttttatttctttttcatacacaaatagtattgaagttttgtttataaatttaaaaatgaacttcacgggtatttatttttttagcaactaatcgaaataactaaaatccggaatctacatagaaaatgagcaaaccagagaagcctgtcatatatatagaagacaatcaactatcaagtaaataactacaaaatcagt

SEQ ID NO: 3744 - DNA, 200 bp, Euphorbia heterophylla
actgattttgtagttatttacttgatagttgattgtcttctatatatatgacaggcttctctggtttgctcattttctatgtagattccggattttagttatttcgattagttgctaaaaaaataaatacccgtgaagttcatttttaaatttataaacaaaacttcaatactatttgtgtatgaaaaagaaataaaaca

SEQ ID NO: 3745 - DNA, 200 bp, Euphorbia heterophylla
tcaagtaaataactacaaaatcagtctcgggctacgacaaccaattgtttcccgacattatggccagaaaatatccctataagagcttttggagcttcctcgaggccttctgctacatcttctacatacacaaattttccttccttgatgttagggataaccaattgtaggaatttcgggtagaggtgatagaaatcacc

SEQ ID NO: 3746 - DNA, 200 bp, Euphorbia heterophylla
ggtgatttctatcacctctacccgaaattcctacaattggttatccctaacatcaaggaaggaaaatttgtgtatgtagaagatgtagcagaaggcctcgaggaagctccaaaagctcttatagggatattttctggccataatgtcgggaaacaattggttgtcgtagcccgagactgattttgtagttatttacttga

SEQ ID NO: 3747 - DNA, 200 bp, Euphorbia heterophylla
tcgggtagaggtgatagaaatcaccagccaagaatccttccattcgaattcgtttcccaatcacattgcctaggttatatattccttcgggattttcaagattgtattgagaaatcattccacacaccgcaattctacctcgaaccctcatgtttaggagcactgcgtccaacattttccccccaacattctcaaagtat

SEQ ID NO: 3748 - DNA, 200 bp, Euphorbia heterophylla
atactttgagaatgttggggggaaaatgttggacgcagtgctcctaaacatgagggttcgaggtagaattgcggtgtgtggaatgatttctcaatacaatcttgaaaatcccgaaggaatatataacctaggcaatgtgattgggaaacgaattcgaatggaaggattcttggctggtgatttctatcacctctacccga

SEQ ID NO: 3749 - DNA, 200 bp, Euphorbia heterophylla
tttccccccaacattctcaaagtatatatctatgccttccggaaaatacctgcaattccaatacaagacaatcaaagctatgaagcacttggttcaaattcaaaccatggaaacttgacagaaaaaataataaatttaaaaaatttaccttttgagtgctgcatccaagtcaggttcttccttgtaattgaaagcctcgt

SEQ ID NO: 3750 - DNA, 200 bp, Euphorbia heterophylla
acgaggctttcaattacaaggaagaacctgacttggatgcagcactcaaaaggtaaattttttaaatttattattttttctgtcaagtttccatggtttgaatttgaaccaagtgcttcatagctttgattgtcttgtattggaattgcaggtattttccggaaggcatagatatatactttgagaatgttggggggaaa

SEQ ID NO: 3751 - DNA, 200 bp, Euphorbia heterophylla
tcttccttgtaattgaaagcctcgtcatacccgaacttatttttcagaagatcaacctgtaagaaccaaggaaaacgcaactcaacaaaaacctttagaaatgtttacaagttttcaggaggttgttgtaaaatgccaacataattcgtccaacggcctctttgaaagacgattttgcccttatttgcgtaatgaaaacc

SEQ ID NO: 3752 - DNA, 200 bp, Euphorbia heterophylla
ggttttcattacgcaaataagggcaaaatcgtctttcaaagaggccgttggacgaattatgttggcattttacaacaacctcctgaaaacttgtaaacatttctaaaggtttttgttgagttgcgttttccttggttcttacaggttgatcttctgaaaaataagttcgggtatgacgaggctttcaattacaaggaaga

SEQ ID NO: 3753 - DNA, 200 bp, Euphorbia heterophylla
attttgctttgaattctgtttccagcttaccggagatctcgacaagatggtcgcattgcaaaggttgttggaaccctatggcatttgcgaggtttgtggttaaaactgtcttttccttatgccataacatctttttaaaaattatatctttaattctttatctttttataggtggcaagaacagggcgaatagcattggt

SEQ ID NO: 3754 - DNA, 200 bp, Euphorbia heterophylla
accaatgctattcgccctgttcttgccacctataaaaagataaagaattaaagatataatttttaaaaagatgttatggcataaggaaaagacagttttaaccacaaacctcgcaaatgccatagggttccaacaacctttgcaatgcgaccatcttgtcgagatctccggtaagctggaaacagaattcaaagcaaaat

SEQ ID NO: 3755 - DNA, 200 bp, Euphorbia heterophylla
ccccccttacctcgctccaaggtgcagttgcacacgatatcagtctttgtgggtgatgagagcgggatgataaatagaatagctggcgtttttgctagaaggggttacaacattgagtcccttgctgttggtttgaacaaggacaaggctctttttactattgttgtttccggaactgacaaggttttgcaacaagttgt

SEQ ID NO: 3756 - DNA, 200 bp, Euphorbia heterophylla
acaacttgttgcaaaaccttgtcagttccggaaacaacaatagtaaaaagagccttgtccttgttcaaaccaacagcaagggactcaatgttgtaaccccttctagcaaaaacgccagctattctatttatcatcccgctctcatcacccacaaagactgatatcgtgtgcaactgcaccttggagcgaggtaagggggg

SEQ ID NO: 3757 - DNA, 200 bp, Euphorbia heterophylla
ctgacaaggttttgcaacaagttgtcgagcagctcaacaagcttgtcaatgtcatcaaggtggaagatatctctaaggaaccacatgtggaacgtgaactgatgcttataaaacttaatgtggatctagaaactcgtcccgagattatgtggctgttggatgtcttcagagctaaagttgttgatacctcagagcataca

SEQ ID NO: 3758 - DNA, 200 bp, Euphorbia heterophylla
tgtatgctctgaggtatcaacaactttagctctgaagacatccaacagccacataatctcgggacgagtttctagatccacattaagttttataagcatcagttcacgttccacatgtggttccttagagatatcttccaccttgatgacattgacaagcttgttgagctgctcgacaacttgttgcaaaaccttgtcag

SEQ ID NO: 3759 - DNA, 200 bp, Euphorbia heterophylla
agttgttgatacctcagagcatacaatgactattgaggttaccggagaccctggtaaaatggttgctgttgtaaggaacctaagcaagttcagaatcaaagagatttctagaactggaaagattgctctaagacgggaaaggatgggcgagacagcaccgttctggaggttttctgcagcttcctatccggaccttgaaa

SEQ ID NO: 3760 - DNA, 200 bp, Euphorbia heterophylla
tttcaaggtccggataggaagctgcagaaaacctccagaacggtgctgtctcgcccatcctttcccgtcttagagcaatctttccagttctagaaatctctttgattctgaacttgcttaggttccttacaacagcaaccattttaccagggtctccggtaacctcaatagtcattgtatgctctgaggtatcaacaact

SEQ ID NO: 3761 - DNA, 200 bp, Euphorbia heterophylla
gaaaaattgtttgtgctcaataggtggaagatatctctaaggaaccacatgtggaacgtgaactgatgcttataaaacttaatgtggatctagaaactcgtcccgaggtaatcttgtagtatttagtttgtctcttttctttcatttattattttgtaagccttagttttgttgtatgatattgacaatcttctgcaaat

SEQ ID NO: 3762 - DNA, 200 bp, Euphorbia heterophylla
atttgcagaagattgtcaatatcatacaacaaaactaaggcttacaaaataataaatgaaagaaaagagacaaactaaatactacaagattacctcgggacgagtttctagatccacattaagttttataagcatcagttcacgttccacatgtggttccttagagatatcttccacctattgagcacaaacaatttttc

SEQ ID NO: 3763 - DNA, 200 bp, Euphorbia heterophylla
gatagctttaccgtaactcaagttctcgatgctcattggggtgtcctcaatgaggaagatacaactggacttcgatcccacactctatctatggtagtaaatgactctcctggagttctcaacatcgtgacaggggtatttgctcgaaggggctataacattcagagtttggcagttgggcattcagaaattgaggggcg

SEQ ID NO: 3764 - DNA, 200 bp, Euphorbia heterophylla
cgcccctcaatttctgaatgcccaactgccaaactctgaatgttatagccccttcgagcaaatacccctgtcacgatgttgagaactccaggagagtcatttactaccatagatagagtgtgggatcgaagtccagttgtatcttcctcattgaggacaccccaatgagcatcgagaacttgagttacggtaaagctatc

SEQ ID NO: 3765 - DNA, 200 bp, Euphorbia heterophylla
ttgggcattcagaaattgaggggcgctcacgaattacaactgtggttcctggtactgatgaatcaattagcaagttggtgcagcaactttacaagctaatagagctccacgaggttcgggatcttacccacttgccatttgctgaacgagagttgatgctgataaaaattgcggtgaatgctgctgcacggcgtgatgtc

SEQ ID NO: 3766 - DNA, 200 bp, Euphorbia heterophylla
gacatcacgccgtgcagcagcattcaccgcaatttttatcagcatcaactctcgttcagcaaatggcaagtgggtaagatcccgaacctcgtggagctctattagcttgtaaagttgctgcaccaacttgctaattgattcatcagtaccaggaaccacagttgtaattcgtgagcgcccctcaatttctgaatgcccaa

SEQ ID NO: 3767 - DNA, 200 bp, Euphorbia heterophylla
gaatgctgctgcacggcgtgatgtcctcgacattgccagcatattcagagcaagagccattgatgtatcggaccacacaataactctcgagcttaccggagatctcgacaagatggtcgcattgcaaaggttgttggaaccctatggcatttgcgaggtggcaagaacagggcgaatagcattggttcgagagtctggtg

SEQ ID NO: 3768 - DNA, 200 bp, Euphorbia heterophylla
caccagactctcgaaccaatgctattcgccctgttcttgccacctcgcaaatgccatagggttccaacaacctttgcaatgcgaccatcttgtcgagatctccggtaagctcgagagttattgtgtggtccgatacatcaatggctcttgctctgaatatgctggcaatgtcgaggacatcacgccgtgcagcagcattc

SEQ ID NO: 3769 - DNA, 200 bp, Euphorbia heterophylla
ggagccttatgatgaattctctgtgcatcaagttctcgatgctcattggggagttctctatgatgaagattctagtggacttcgatcacatacgttatccatacttgtgaatgattctcctggtgttctcaacacgattaccggggttatgtctcggcgaggttataacatccagagtcttgctgtgggtcgagctgaga

SEQ ID NO: 3770 - DNA, 200 bp, Euphorbia heterophylla
tctcagctcgacccacagcaagactctggatgttataacctcgccgagacataaccccggtaatcgtgttgagaacaccaggagaatcattcacaagtatggataacgtatgtgatcgaagtccactagaatcttcatcatagagaactccccaatgagcatcgagaacttgatgcacagagaattcatcataaggctcc

SEQ ID NO: 3771 - DNA, 200 bp, Euphorbia heterophylla
agtcttgctgtgggtcgagctgagagagagggactttctcgcattacaactgttatccttggaaatgatgatacagttagaaagttggttctgcaacttcacaagttgattgatatacatgaggtacaagatattacacatttgccatttgcagagcgagagttaatgctgataaaggtggcagtcaatactgcagccag

SEQ ID NO: 3772 - DNA, 200 bp, Euphorbia heterophylla
ctggctgcagtattgactgccacctttatcagcattaactctcgctctgcaaatggcaaatgtgtaatatcttgtacctcatgtatatcaatcaacttgtgaagttgcagaaccaactttctaactgtatcatcatttccaaggataacagttgtaatgcgagaaagtccctctctctcagctcgacccacagcaagact

SEQ ID NO: 3773 - DNA, 200 bp, Euphorbia heterophylla
aggtggcagtcaatactgcagccaggagagatgtcctagatattgctagcatatttcgggccaaagctgttgatgtgtctgaccacacaattaccctagagcttactggtgatttaacaaagatggcggccctgcagaaactattagagccatatgggatttgtgaggcagcacggactggaagggtggcattggtgagg

SEQ ID NO: 3774 - DNA, 200 bp, Euphorbia heterophylla
cctcaccaatgccacccttccagtccgtgctgcctcacaaatcccatatggctctaatagtttctgcagggccgccatctttgttaaatcaccagtaagctctagggtaattgtgtggtcagacacatcaacagctttggcccgaaatatgctagcaatatctaggacatctctcctggctgcagtattgactgccacct

SEQ ID NO: 3775 - DNA, 200 bp, Euphorbia heterophylla
ggggaatttggaatcccacattgcgtggctatgagcataaaatgcctcctacattgatgaacaatcctgaccccatagaatacctttttgggtaatatatggatgcttgcaggcttatatccctttcttcaaagcaatttaaaaactaatatgtatgcttttgttgctttaaatattggatcattatgtaattagctata

SEQ ID NO: 3776 - DNA, 200 bp, Euphorbia heterophylla
tatagctaattacataatgatccaatatttaaagcaacaaaagcatacatattagtttttaaattgctttgaagaaagggatataagcctgcaagcatccatatattacccaaaaaggtattctatggggtcaggattgttcatcaatgtaggaggcattttatgctcatagccacgcaatgtgggattccaaattcccc

SEQ ID NO: 3777 - DNA, 200 bp, Euphorbia heterophylla
ttggatcattatgtaattagctataaattccagattatgtggctgttggatgtcttcagagctaaagttgttgatacctcagagcatacaatgactattgaggtaattttaagtattacgtatcatatcctttatctgtacgtctaatggctgtgaagattcatgtaggattggatttaaaattgaaaggtcgaatatgg

SEQ ID NO: 3778 - DNA, 200 bp, Euphorbia heterophylla
ccatattcgacctttcaattttaaatccaatcctacatgaatcttcacagccattagacgtacagataaaggatatgatacgtaatacttaaaattacctcaatagtcattgtatgctctgaggtatcaacaactttagctctgaagacatccaacagccacataatctggaatttatagctaattacataatgatccaa

SEQ ID NO: 3779 - DNA, 200 bp, Euphorbia heterophylla
tttaaaattgaaaggtcgaatatgggagtttttcctttggtttgtggctttgtgcctttcaacatcataactttttatgaggtttttattgttcatcaatttatcatatgattgcaatgggtcttaaggtgaaccttatcagaaaattgcttaagcaaaatatcttgcagtttataattgaactagttcacttgatggtt

SEQ ID NO: 3780 - DNA, 200 bp, Euphorbia heterophylla
aaccatcaagtgaactagttcaattataaactgcaagatattttgcttaagcaattttctgataaggttcaccttaagacccattgcaatcatatgataaattgatgaacaataaaaacctcataaaaagttatgatgttgaaaggcacaaagccacaaaccaaaggaaaaactcccatattcgacctttcaattttaaa

SEQ ID NO: 3781 - DNA, 200 bp, Euphorbia heterophylla
tctgatactttaaaaattaaagattattaatagttgtttaataatattgacaaatgaatgaactggaaatattgaacatattgttgttgaaaagttgtgcatattaattatgaagttaagtttgatgcaaacttgtagctaatcatttttctagtaatttagtttcaatgatagtatcagtgtaatatatgatatgtgga

SEQ ID NO: 3782 - DNA, 200 bp, Euphorbia heterophylla
tccacatatcatatattacactgatactatcattgaaactaaattactagaaaaatgattagctacaagtttgcatcaaacttaacttcataattaatatgcacaacttttcaacaacaatatgttcaatatttccagttcattcatttgtcaatattattaaacaactattaataatctttaatttttaaagtatcaga

SEQ ID NO: 3783 - DNA, 200 bp, Euphorbia heterophylla
atcagtgtaatatatgatatgtggaaatttttaagggctttaacatcttaatttttcagcatagctatggagtaataggagttcacttttaactaccaaatatgtttctgttatgattttttaacatttttcctcatttctgatgcttgtgttggtagctatgcttttcatgatatactaattgctatagttgttttagt

SEQ ID NO: 3784 - DNA, 200 bp, Euphorbia heterophylla
actaaaacaactatagcaattagtatatcatgaaaagcatagctaccaacacaagcatcagaaatgaggaaaaatgttaaaaaatcataacagaaacatatttggtagttaaaagtgaactcctattactccatagctatgctgaaaaattaagatgttaaagcccttaaaaatttccacatatcatatattacactgat

SEQ ID NO: 3785 - DNA, 200 bp, Euphorbia heterophylla
tactaattgctatagttgttttagtctttccattacttttacttgtaaaatatattaagtggtatattagtttgttgagcttggtgaacctccatattttatttatcttttataccaagtgcccagattgtttgtggtttattatggctatgttttttttcccattgcatggaaaccttggtggcttgaacagaattcta

SEQ ID NO: 3786 - DNA, 200 bp, Euphorbia heterophylla
tagaattctgttcaagccaccaaggtttccatgcaatgggaaaaaaaacatagccataataaaccacaaacaatctgggcacttggtataaaagataaataaaatatggaggttcaccaagctcaacaaactaatataccacttaatatattttacaagtaaaagtaatggaaagactaaaacaactatagcaattagta

SEQ ID NO: 3787 - DNA, 200 bp, Euphorbia heterophylla
ccttggtggcttgaacagaattctagtttatgtacggtagttttgaaaaatgatgtgcgttgaaagtgtagttgaaatttcaaatcaaatgcaccttttgaaattcctaaaggctaatttattgttattggtttaggtgactggagatccagggaagatggttgctgtcgagagaaacttaagcaagtttggaattagag

SEQ ID NO: 3788 - DNA, 200 bp, Euphorbia heterophylla
ctctaattccaaacttgcttaagtttctctcgacagcaaccatcttccctggatctccagtcacctaaaccaataacaataaattagcctttaggaatttcaaaaggtgcatttgatttgaaatttcaactacactttcaacgcacatcatttttcaaaactaccgtacataaactagaattctgttcaagccaccaagg

SEQ ID NO: 3789 - DNA, 200 bp, Euphorbia heterophylla
aacttaagcaagtttggaattagagaaattgcaagaactggaaaggttgtgttcagttttctttttattgtggctgttttgtaggttttagtttgccgttgattcgtgagcctgctgttctgaatagattgcattgagaagggaaaaaatgggggcttgtgctccattttggcgattttcagctgcttcatatcccgatc

SEQ ID NO: 3790 - DNA, 200 bp, Euphorbia heterophylla
gatcgggatatgaagcagctgaaaatcgccaaaatggagcacaagcccccattttttcccttctcaatgcaatctattcagaacagcaggctcacgaatcaacggcaaactaaaacctacaaaacagccacaataaaaagaaaactgaacacaacctttccagttcttgcaatttctctaattccaaacttgcttaagtt

SEQ ID NO: 3791 - DNA, 200 bp, Euphorbia heterophylla
ttttcagctgcttcatatcccgatcttggagaaacaatgtcgaataattctctcttggaaactaaaagttcagcaattgtaggggaagacaccacatcttcaggggtatgccaatttcaagttttaattttgtctgtttggtgctttttagagactatccctgaacatttacaactttatgagcaaatccagggggatgt

SEQ ID NO: 3792 - DNA, 200 bp, Euphorbia heterophylla
acatccccctggatttgctcataaagttgtaaatgttcagggatagtctctaaaaagcaccaaacagacaaaattaaaacttgaaattggcatacccctgaagatgtggtgtcttcccctacaattgctgaacttttagtttccaagagagaattattcgacattgtttctccaagatcgggatatgaagcagctgaaaa

SEQ ID NO: 3793 - DNA, 200 bp, Euphorbia heterophylla
tttatgagcaaatccagggggatgtatatccagtggaaccgtctgacagctttaccgtaactcaagttctcgatgctcattggggtgtcctcaatgaggaagatgtaggtctgcttattttcaattccatctttttttttccggtcttatagagcgcacattaatttgtcgagtatttcagacaactggacttcgatccc

SEQ ID NO: 3794 - DNA, 200 bp, Euphorbia heterophylla
gggatcgaagtccagttgtctgaaatactcgacaaattaatgtgcgctctataagaccggaaaaaaaaagatggaattgaaaataagcagacctacatcttcctcattgaggacaccccaatgagcatcgagaacttgagttacggtaaagctgtcagacggttccactggatatacatccccctggatttgctcataaa

SEQ ID NO: 3795 - DNA, 200 bp, Euphorbia heterophylla
tttcagacaactggacttcgatcccacactctatctatggtagtaaatgactctcctggagttctcaacatcgtgacaggggtatttgctcgaaggggctataacattcaggtatttctgatgactttcttctctggtttgaccttgtttcccttaatcctagaatggattgaagaacaaatgattttctcgtctttggc

SEQ ID NO: 3796 - DNA, 200 bp, Euphorbia heterophylla
gccaaagacgagaaaatcatttgttcttcaatccattctaggattaagggaaacaaggtcaaaccagagaagaaagtcatcagaaatacctgaatgttatagccccttcgagcaaatacccctgtcacgatgttgagaactccaggagagtcatttactaccatagatagagtgtgggatcgaagtccagttgtctgaaa

SEQ ID NO: 3797 - DNA, 200 bp, Euphorbia heterophylla
aacaaatgattttctcgtctttggcggcagagtttggcagttgggcattcagaaattgaggggcgttcacgaattacaactgtggttcctggtactgatgaatccattagcaagttggtgcagcaactttacaagctaatagagctccacgaggtcagaaaacttcaccaacaagtgtcaatttttttgagtaaataatg

SEQ ID NO: 3798 - DNA, 200 bp, Euphorbia heterophylla
cattatttactcaaaaaaattgacacttgttggtgaagttttctgacctcgtggagctctattagcttgtaaagttgctgcaccaacttgctaatggattcatcagtaccaggaaccacagttgtaattcgtgaacgcccctcaatttctgaatgcccaactgccaaactctgccgccaaagacgagaaaatcatttgtt

SEQ ID NO: 3799 - DNA, 200 bp, Euphorbia heterophylla
tgtcaatttttttgagtaaataatgtgttttgtgttttgatgtaatattctattgttttgaaacaaaacgcctctattaccaatctaatgtctcggagaaaaaagaactttttggtccctgtgctataaactttttggccatttggtccatgtggtatacacttgacctttttgctccctattctatgcaatatattacc

SEQ ID NO: 3800 - DNA, 200 bp, Euphorbia heterophylla
ggtaatatattgcatagaatagggagcaaaaaggtcaagtgtataccacatggaccaaatggccaaaaagtttatagcacagggaccaaaaagttcttttttctccgagacattagattggtaatagaggcgttttgtttcaaaacaatagaatattacatcaaaacacaaaacacattatttactcaaaaaaattgaca

SEQ ID NO: 3801 - DNA, 200 bp, Kochia scoparia
catgtcttgaaagggaaaaaaatcaaagtgggacaactaattccaaacttcctaaaatagaaacttggacatctaaaaaaaatggaggaagtatatttttactattttcttatctcttgtagctagcactttattttctgtccttattccttgcttgccaagtttgagtgtcgccatattttttgaccagagaaagtaca

SEQ ID NO: 3802 - DNA, 200 bp, Kochia scoparia
tgtactttctctggtcaaaaaatatggcgacactcaaacttggcaagcaaggaataaggacagaaaataaagtgctagctacaagagataagaaaatagtaaaaatatacttcctccattttttttagatgtccaagtttctattttaggaagtttggaattagttgtcccactttgatttttttccctttcaagacatg

SEQ ID NO: 3803 - DNA, 200 bp, Kochia scoparia
atattttttgaccagagaaagtacaaactattctttgtctgtcccaattttctatttctgaaacctttcttgcatgtaaagattctcattctacctattgaagataaatattgtggaaggaatgatccatggagaaaaacatggcttgaagttgactagatcttctgaagattttttttttaatacattgatgaactcat

SEQ ID NO: 3804 - DNA, 200 bp, Kochia scoparia
atgagttcatcaatgtattaaaaaaaaaatcttcagaagatctagtcaacttcaagccatgtttttctccatggatcattccttccacaatatttatcttcaataggtagaatgagaatctttacatgcaagaaaggtttcagaaatagaaaattgggacagacaaagaatagtttgtactttctctggtcaaaaaatat

SEQ ID NO: 3805 - DNA, 200 bp, Kochia scoparia
ttttttaatacattgatgaactcatgcacttgaattttcctaaaatggatttagcatctcaatgaatagcatttgcttaatcattctgttgatagtcacgatacactgtacaaaagctgattctaattgtgatgcttctgaccgactgactcccagcttaccggagatgtgcataagatggttgctctccaaagattgct

SEQ ID NO: 3806 - DNA, 200 bp, Kochia scoparia
agcaatctttggagagcaaccatcttatgcacatctccggtaagctgggagtcagtcggtcagaagcatcacaattagaatcagcttttgtacagtgtatcgtgactatcaacagaatgattaagcaaatgctattcattgagatgctaaatccattttaggaaaattcaagtgcatgagttcatcaatgtattaaaaaa

SEQ ID NO: 3807 - DNA, 200 bp, Kochia scoparia
agatggttgctctccaaagattgctggagccctatggaatatgcgaggtaggatttctgtacattgtctaagttgcctagtatgtcaaaaatatcagttgtttcttgctcggttctcacatcatctgtattgacattattcaaatacctgtaaaggaggatttcactgtagatatggtggctttgcacttacttttcgac

SEQ ID NO: 3808 - DNA, 200 bp, Kochia scoparia
gtcgaaaagtaagtgcaaagccaccatatctacagtgaaatcctcctttacaggtatttgaataatgtcaatacagatgatgtgagaaccgagcaagaaacaactgatatttttgacatactaggcaacttagacaatgtacagaaatcctacctcgcatattccatagggctccagcaatctttggagagcaaccatct

SEQ ID NO: 3809 - DNA, 200 bp, Kochia scoparia
ggtggctttgcacttacttttcgaccaaaaatccactatcatggagactactctttattcagtacatcaacaaacatttaatatgaatggataattggatactatgagtgagatgtactcttgaatatgaatggatagtatgagatgtaacgtttaatatgaatgctatacacttgaatatctgaggatatctgacttgc

SEQ ID NO: 3810 - DNA, 200 bp, Kochia scoparia
gcaagtcagatatcctcagatattcaagtgtatagcattcatattaaacgttacatctcatactatccattcatattcaagagtacatctcactcatagtatccaattatccattcatattaaatgtttgttgatgtactgaataaagagtagtctccatgatagtggatttttggtcgaaaagtaagtgcaaagccacc

SEQ ID NO: 3811 - DNA, 200 bp, Kochia scoparia
gaatatctgaggatatctgacttgccatactgccagtttgcttcctcatagtagtattgcatcttcttttacactacatagcttgttactgtattgttttaaatgtcttaataactgcatacatgtttttgtaataatataggttgcgcgtactgggcgagtggccttggttcgtgagtctggcgtagactcgaaatatc

SEQ ID NO: 3812 - DNA, 200 bp, Kochia scoparia
gatatttcgagtctacgccagactcacgaaccaaggccactcgcccagtacgcgcaacctatattattacaaaaacatgtatgcagttattaagacatttaaaacaatacagtaacaagctatgtagtgtaaaagaagatgcaatactactatgaggaagcaaactggcagtatggcaagtcagatatcctcagatattc

SEQ ID NO: 3813 - DNA, 200 bp, Kochia scoparia
gagtctggcgtagactcgaaatatcttcgtggatactcttttcccgtataagtgtctgagcaaaaaaaatacttcgggaggaaggcattcgagttttgtcagaatatacttttgcaatattttctttattgtttttataggtagaaagtaagcaatcttgtaacctatttttgttgtttgcttttgtagaatttttttca

SEQ ID NO: 3814 - DNA, 200 bp, Kochia scoparia
tgaaaaaaattctacaaaagcaaacaacaaaaataggttacaagattgcttactttctacctataaaaacaataaagaaaatattgcaaaagtatattctgacaaaactcgaatgccttcctcccgaagtattttttttgctcagacacttatacgggaaaagagtatccacgaagatatttcgagtctacgccagactc

SEQ ID NO: 3815 - DNA, 200 bp, Kochia scoparia
gtttgcttttgtagaatttttttcaaaccagaaaacttttgagaattgaacaaatgaagtgtatttctttctaaggtatatgttctctatccattgccggttggttttcttcccatttttgtgtgtgtgtgtgtgtgtttgtcgatacttgtgagcggtactatggagctcgatacttgtacgttgttcagatgttgaat

SEQ ID NO: 3816 - DNA, 200 bp, Kochia scoparia
attcaacatctgaacaacgtacaagtatcgagctccatagtaccgctcacaagtatcgacaaacacacacacacacacacaaaaatgggaagaaaaccaaccggcaatggatagagaacatataccttagaaagaaatacacttcatttgttcaattctcaaaagttttctggtttgaaaaaaattctacaaaagcaaac

SEQ ID NO: 3817 - DNA, 200 bp, Kochia scoparia
cttgtacgttgttcagatgttgaatagtaatatacgaagtactctgtcgtatctttatgtttatccatatttttctgcagattaagtttactgtaaatcataaccttgtgctcatgatgagcgtccaaatcagattttcacatgccaaaactatatgatgcacttctttcactagtgtatcatatacaagaataagttta

SEQ ID NO: 3818 - DNA, 200 bp, Kochia scoparia
taaacttattcttgtatatgatacactagtgaaagaagtgcatcatatagttttggcatgtgaaaatctgatttggacgctcatcatgagcacaaggttatgatttacagtaaacttaatctgcagaaaaatatggataaacataaagatacgacagagtacttcgtatattactattcaacatctgaacaacgtacaag

SEQ ID NO: 3819 - DNA, 200 bp, Kochia scoparia
tgtatcatatacaagaataagtttaatgacaacccaccaaattaaattttttaaaataagtttagtgcgtcctcaataatatttaatttttataatttttgaaaataaaatggacattgacatatgtaacgaagggaatacttttggggtttaattcatttaatttaaaaaaaagtaagttgagacttgacagcaggacc

SEQ ID NO: 3820 - DNA, 200 bp, Kochia scoparia
ggtcctgctgtcaagtctcaacttacttttttttaaattaaatgaattaaaccccaaaagtattcccttcgttacatatgtcaatgtccattttattttcaaaaattataaaaattaaatattattgaggacgcactaaacttattttaaaaaatttaatttggtgggttgtcattaaacttattcttgtatatgataca

SEQ ID NO: 3821 - DNA, 200 bp, Kochia scoparia
taagttgagacttgacagcaggaccaacaaatcgtgatgatgcgaaattgtgaatgacacgatgtttgtgcactctcctccgtcctcagtccaaaactcaatcactcaaatctgaaatattcaccagagcttaaccacagcttaatatcagcaccaagtcagtcgtcacagcttccgaccaccacgacgaggttcttttt

SEQ ID NO: 3822 - DNA, 200 bp, Kochia scoparia
aaaaagaacctcgtcgtggtggtcggaagctgtgacgactgacttggtgctgatattaagctgtggttaagctctggtgaatatttcagatttgagtgattgagttttggactgaggacggaggagagtgcacaaacatcgtgtcattcacaatttcgcatcatcacgatttgttggtcctgctgtcaagtctcaactta

SEQ ID NO: 3823 - DNA, 200 bp, Kochia scoparia
cgaccaccacgacgaggttctttttgctgcctttgagcctctcatttttgtttttgtcatgcaactttatatttcaatatttatatttatattttgaggtgtcaatattgataggatcataaacaattatacataaggtttgaaggcgaatcgaacaagatttcctattactcccagacccagtgtaaaaaactaaacaa

SEQ ID NO: 3824 - DNA, 200 bp, Kochia scoparia
ttgtttagttttttacactgggtctgggagtaataggaaatcttgttcgattcgccttcaaaccttatgtataattgtttatgatcctatcaatattgacacctcaaaatataaatataaatattgaaatataaagttgcatgacaaaaacaaaaatgagaggctcaaaggcagcaaaaagaacctcgtcgtggtggtcg

SEQ ID NO: 3825 - DNA, 200 bp, Kochia scoparia
agacccagtgtaaaaaactaaacaagtcaaagtttatgagtgagtcaatagtatcaaaatatagcaacaaacaagattccaatgttgaagttcattttgtagaattgtggctgaaatttcaattaaactagttactttgttcaattgtcagttaaagttttgcctaaacattgcttgtgcagctgtttttttagtttttg

SEQ ID NO: 3826 - DNA, 200 bp, Kochia scoparia
caaaaactaaaaaaacagctgcacaagcaatgtttaggcaaaactttaactgacaattgaacaaagtaactagtttaattgaaatttcagccacaattctacaaaatgaacttcaacattggaatcttgtttgttgctatattttgatactattgactcactcataaactttgacttgtttagttttttacactgggtct

SEQ ID NO: 3827 - DNA, 200 bp, Kochia scoparia
tgtgcagctgtttttttagtttttgttttttgcatcttattgatggtagctgtttgattattctgattttattgttcatacttaattagtattactgaatttgatttatgattttaattgctattattgtgtttgattgtttgatgtctattttgagtctaactgaataaattataactacgaagtattatttttatgaa

SEQ ID NO: 3828 - DNA, 200 bp, Kochia scoparia
ttcataaaaataatacttcgtagttataatttattcagttagactcaaaatagacatcaaacaatcaaacacaataatagcaattaaaatcataaatcaaattcagtaatactaattaagtatgaacaataaaatcagaataatcaaacagctaccatcaataagatgcaaaaaacaaaaactaaaaaaacagctgcaca

SEQ ID NO: 3829 - DNA, 200 bp, Kochia scoparia
aactacgaagtattatttttatgaatcaatttattatttttcatagacaattagaaaaacaaataatcaacgacctattcatcctgctagcttagtacttgggactgacaactttgatgagagaaaagaagaacacagtttaaatagttttaaaaatcaacattaactaaattatagataggggtaaatgagattcgaac

SEQ ID NO: 3830 - DNA, 200 bp, Kochia scoparia
gttcgaatctcatttacccctatctataatttagttaatgttgatttttaaaactatttaaactgtgttcttcttttctctcatcaaagttgtcagtcccaagtactaagctagcaggatgaataggtcgttgattatttgtttttctaattgtctatgaaaaataataaattgattcataaaaataatacttcgtagtt

SEQ ID NO: 3831 - DNA, 200 bp, Kochia scoparia
taagtggaagagatgaaatgtctagttatggaattatggttgatgattttggtttctggtttggtaaacggggaattctctggctagttttgcattgatgaacaaagtcattgcaccaagccaccaactgttttcatttgaaggaggctccccgactcatgtatttttcagccatgaatctcgatcaagtgattaatttg

SEQ ID NO: 3832 - DNA, 200 bp, Kochia scoparia
caaattaatcacttgatcgagattcatggctgaaaaatacatgagtcggggagcctccttcaaatgaaaacagttggtggcttggtgcaatgactttgttcatcaatgcaaaactagccagagaattccccgtttaccaaaccagaaaccaaaatcatcaaccataattccataactagacatttcatctcttccactta

SEQ ID NO: 3833 - DNA, 200 bp, Kochia scoparia
gaatctcgatcaagtgattaatttgatcttaggtcattcatattgctcttgttgttcgcatggtttttttaaaactttctagcattcagactatggtaatttcttttttcatgccaacacttccatcatttgtcataacctattgcttgacgaagattctgtgtaatgacatgtgcttgagtttccacttattcacaaca

SEQ ID NO: 3834 - DNA, 200 bp, Kochia scoparia
tgttgtgaataagtggaaactcaagcacatgtcattacacagaatcttcgtcaagcaataggttatgacaaatgatggaagtgttggcatgaaaaaagaaattaccatagtctgaatgctagaaagttttaaaaaaaccatgcgaacaacaagagcaatatgaatgacctaagatcaaattaatcacttgatcgagattc

SEQ ID NO: 3835 - DNA, 200 bp, Kochia scoparia
cttgagtttccacttattcacaacaaccaagttgtgagaagttgatgatttatagggcgtgtttggcaatagtagctggcagtgggcgtttagttgtggaaatagttggtagtgctaacattggtagttagcggtagtagtagatgttaagtgtcaacaagggattatacaatctaataatttggcaatggtaacagttg

SEQ ID NO: 3836 - DNA, 200 bp, Kochia scoparia
caactgttaccattgccaaattattagattgtataatcccttgttgacacttaacatctactactaccgctaactaccaatgttagcactaccaactatttccacaactaaacgcccactgccagctactattgccaaacacgccctataaatcatcaacttctcacaacttggttgttgtgaataagtggaaactcaag

SEQ ID NO: 3837 - DNA, 200 bp, Kochia scoparia
aataatttggcaatggtaacagttgtatatataataaaagaaaaatggtataagaagaaaaaattgtacccgctacatgacaaatgttagtcctagtgttgagcaatattctctttaagtacttacctctatccgaaacattattttgccaaaccataatttaaattaccaagtagtgttttgatctagccataccacta

SEQ ID NO: 3838 - DNA, 200 bp, Kochia scoparia
tagtggtatggctagatcaaaacactacttggtaatttaaattatggtttggcaaaataatgtttcggatagaggtaagtacttaaagagaatattgctcaacactaggactaacatttgtcatgtagcgggtacaattttttcttcttataccatttttcttttattatatatacaactgttaccattgccaaattatt

SEQ ID NO: 3839 - DNA, 200 bp, Kochia scoparia
gtgttttgatctagccataccactaaatgctatcttatactcctacgccgatcacgcccatagcataggtgaaactatataaaaaaaaatgctaatgaaatgcccctatcccaaaacaaaataaatgcattgtaacccaagtattagtagatttgatcatggtatttggttgattttgattaatggctgtagttcccaag

SEQ ID NO: 3840 - DNA, 200 bp, Kochia scoparia
cttgggaactacagccattaatcaaaatcaaccaaataccatgatcaaatctactaatacttgggttacaatgcatttattttgttttgggataggggcatttcattagcatttttttttatatagtttcacctatgctatgggcgtgatcggcgtaggagtataagatagcatttagtggtatggctagatcaaaacac

SEQ ID NO: 3841 - DNA, 200 bp, Kochia scoparia
ttgattaatggctgtagttcccaagtacaataggaatcttctttggtgaatgtacccacgaccctgaaaaaccttgaattttgcatttattgtaatcaatcaatcaatcaaagccttattatcatatgtggggtcgaacatgaaccaaaagtgattattccaggaggtcatccatatagattttcctcctctattctcta

SEQ ID NO: 3842 - DNA, 200 bp, Kochia scoparia
tagagaatagaggaggaaaatctatatggatgacctcctggaataatcacttttggttcatgttcgaccccacatatgataataaggctttgattgattgattgattacaataaatgcaaaattcaaggtttttcagggtcgtgggtacattcaccaaagaagattcctattgtacttgggaactacagccattaatcaa

SEQ ID NO: 3843 - DNA, 200 bp, Kochia scoparia
atagattttcctcctctattctctacgatcgagagcctcactcttgcaaatccaactgtttcaaatcctttctaactcctccactttatggtaatcattgtataaaaaaacaaaaaacaaaaaacaaagaaagaaaaagaaagaaagaaaagaaaggagatcaaagggcataatagttaattatgatgccaagtaaaaaa

SEQ ID NO: 3844 - DNA, 200 bp, Kochia scoparia
ttttttacttggcatcataattaactattatgccctttgatctcctttcttttctttctttctttttctttctttgttttttgttttttgtttttttatacaatgattaccataaagtggaggagttagaaaggatttgaaacagttggatttgcaagagtgaggctctcgatcgtagagaatagaggaggaaaatctat

SEQ ID NO: 3845 - DNA, 200 bp, Kochia scoparia
gttaattatgatgccaagtaaaaaattagtctgggtcttgggaaatagtgatgtgacaatgaagaggttaacggatgatggtttattccactggaatttgttttaattgttcgtctttcaaaccttgtttgagttatttagttgccttttggtgttgttcaaatcaatttattatcgtgaatttgtgatgactgagatag

SEQ ID NO: 3846 - DNA, 200 bp, Kochia scoparia
ctatctcagtcatcacaaattcacgataataaattgatttgaacaacaccaaaaggcaactaaataactcaaacaaggtttgaaagacgaacaattaaaacaaattccagtggaataaaccatcatccgttaacctcttcattgtcacatcactatttcccaagacccagactaattttttacttggcatcataattaac

SEQ ID NO: 3847 - DNA, 200 bp, Kochia scoparia
cgtgaatttgtgatgactgagataggtgttttcacaacgtatttggtctagaactagtcacaactcgcattttgtttgtggtatgtgtagtagtgacggtgtttccacgggagaaacagagttatgctgcgtttgcatgcattattgtttttggtatcatctttgtttctgattcaatgtttggaattgaaatggagatt

SEQ ID NO: 3848 - DNA, 200 bp, Kochia scoparia
aatctccatttcaattccaaacattgaatcagaaacaaagatgataccaaaaacaataatgcatgcaaacgcagcataactctgtttctcccgtggaaacaccgtcactactacacataccacaaacaaaatgcgagttgtgactagttctagaccaaatacgttgtgaaaacacctatctcagtcatcacaaattcacg

SEQ ID NO: 3849 - DNA, 200 bp, Kochia scoparia
aatgtttggaattgaaatggagattacttcctagttgtttaaatatcttatttgtgattcaggaagttgagtttggtttaaaatgtatgtatctttggattttagaaaaagccaagggaggtcaaatgcccaaatgtgacttgtgatgaagggaattaaaagagatatggagaaagtaggatcatagagctctggataga

SEQ ID NO: 3850 - DNA, 200 bp, Kochia scoparia
tctatccagagctctatgatcctactttctccatatctcttttaattcccttcatcacaagtcacatttgggcatttgacctcccttggctttttctaaaatccaaagatacatacattttaaaccaaactcaacttcctgaatcacaaataagatatttaaacaactaggaagtaatctccatttcaattccaaacatt

SEQ ID NO: 3851 - DNA, 200 bp, Kochia scoparia
gtaggatcatagagctctggatagaggtgaatggaggaagaggtccttattgatgattgtaacatatgaattcttgattcatgcaaccgttattcgtttgacaatatcaaagctttgttataattcttaaggctgtagtgtttccttgtagaaatgctgtaatctgcaaattttgcacatttaatgaattatatgatggg

SEQ ID NO: 3852 - DNA, 200 bp, Kochia scoparia
cccatcatataattcattaaatgtgcaaaatttgcagattacagcatttctacaaggaaacactacagccttaagaattataacaaagctttgatattgtcaaacgaataacggttgcatgaatcaagaattcatatgttacaatcatcaataaggacctcttcctccattcacctctatccagagctctatgatcctac

SEQ ID NO: 3853 - DNA, 200 bp, Kochia scoparia
cacatttaatgaattatatgatgggttatctttaaattgtctataatcttaattgtggttgtttaaaatatgtctaagggcaagacgacataccatttcagtatttgttggggatgagagtggaatgataaatcgaattgctggggtcttcgctagaaggggttataatattgaatctcttgctgttggattgaacaagg

SEQ ID NO: 3854 - DNA, 200 bp, Kochia scoparia
ccttgttcaatccaacagcaagagattcaatattataaccccttctagcgaagaccccagcaattcgatttatcattccactctcatccccaacaaatactgaaatggtatgtcgtcttgcccttagacatattttaaacaaccacaattaagattatagacaatttaaagataacccatcatataattcattaaatgtg

SEQ ID NO: 3855 - DNA, 200 bp, Kochia scoparia
tctcttgctgttggattgaacaaggacaaagctctctttacaattgttgtctctggaactgataaggttttgcagcaagtgatggaacaacttcagaagcttgtaaatgttctgaaggttgtcttttgctttagatgaaaattaattttgcattgatgttttccacgaagtattatctgagatctattctcatggccttt

SEQ ID NO: 3856 - DNA, 200 bp, Kochia scoparia
aaaggccatgagaatagatctcagataatacttcgtggaaaacatcaatgcaaaattaattttcatctaaagcaaaagacaaccttcagaacatttacaagcttctgaagttgttccatcacttgctgcaaaaccttatcagttccagagacaacaattgtaaagagagctttgtccttgttcaatccaacagcaagaga

SEQ ID NO: 3857 - DNA, 200 bp, Kochia scoparia
tctgagatctattctcatggccttttatttatgtttaggttgtagatttatccaaggagcctcaggtagaacgtgaattaatgcttgttaaagttggagctgatcagagtaaacgtgctgaggtatcattcacaatatgtttcggttccccaaaagtggaagctagtaatattattcttgcttgtcagaaaatttcgttt

SEQ ID NO: 3858 - DNA, 200 bp, Kochia scoparia
aaacgaaattttctgacaagcaagaataatattactagcttccacttttggggaaccgaaacatattgtgaatgatacctcagcacgtttactctgatcagctccaactttaacaagcattaattcacgttctacctgaggctccttggataaatctacaacctaaacataaataaaaggccatgagaatagatctcaga

SEQ ID NO: 3859 - DNA, 200 bp, Kochia scoparia
tcttgcttgtcagaaaatttcgtttagttgtagctaattattttgaaacagtaaatttgttgtatgctaatcttccgccatcattcatcctgattgaactttactgtacaagtatctttaaatctttgagctgagtgaattctaatttataatgtttgctacttatataataacttttgttatttccttttgatactgca

SEQ ID NO: 3860 - DNA, 200 bp, Kochia scoparia
tgcagtatcaaaaggaaataacaaaagttattatataagtagcaaacattataaattagaattcactcagctcaaagatttaaagatacttgtacagtaaagttcaatcaggatgaatgatggcggaagattagcatacaacaaatttactgtttcaaaataattagctacaactaaacgaaattttctgacaagcaaga

SEQ ID NO: 3861 - DNA, 200 bp, Kochia scoparia
tttgttatttccttttgatactgcagttaatgtggttggtggacatcttccgtgctaaaattgtggatatttcagaagaaaatcttacgatggaggtatcactggaaacattatgcagattaagacaaatttctaaagaactatgtaatcatcctaacgaggattgacttccaagaattaaacacatgttatctgcttta

SEQ ID NO: 3862 - DNA, 200 bp, Kochia scoparia
taaagcagataacatgtgtttaattcttggaagtcaatcctcgttaggatgattacatagttctttagaaatttgtcttaatctgcataatgtttccagtgatacctccatcgtaagattttcttctgaaatatccacaattttagcacggaagatgtccaccaaccacattaactgcagtatcaaaaggaaataacaaa

SEQ ID NO: 3863 - DNA, 200 bp, Kochia scoparia
aattaaacacatgttatctgctttatttttcagtagtctttgatgctttaggtgcatttgaataatttctgttttaatatatattctaataatgttatagttactgtatgtgattctatgatccaggagatgtaacttataagtattttgttttgcttggtgcatacccatttacttcctggaaatatttcatgtagctt

SEQ ID NO: 3864 - DNA, 200 bp, Kochia scoparia
aagctacatgaaatatttccaggaagtaaatgggtatgcaccaagcaaaacaaaatacttataagttacatctcctggatcatagaatcacatacagtaactataacattattagaatatatattaaaacagaaattattcaaatgcacctaaagcatcaaagactactgaaaaataaagcagataacatgtgtttaatt

SEQ ID NO: 3865 - DNA, 200 bp, Kochia scoparia
ttcctggaaatatttcatgtagcttgtgtcatttatatacttgatcaaacaaggtccgaaaggaagtcatttgagcaacaacttttaacaaccaaggtcccttttttttttttttgaataaaaaacaccacattggccactatatcaaagatttcatgtagcctgccatatctacatgtaaagagtcaactctgcacgca

SEQ ID NO: 3866 - DNA, 200 bp, Kochia scoparia
tgcgtgcagagttgactctttacatgtagatatggcaggctacatgaaatctttgatatagtggccaatgtggtgttttttattcaaaaaaaaaaaaaagggaccttggttgttaaaagttgttgctcaaatgacttcctttcggaccttgtttgatcaagtatataaatgacacaagctacatgaaatatttccaggaa

SEQ ID NO: 3867 - DNA, 200 bp, Kochia scoparia
atgtaaagagtcaactctgcacgcaatgctttttgttcaatgtttgtgcctttgtggtgtcatggacctcatggtgtggactgtggaggaacaaaaactacatttggtgcctacttttatgactcaggattatgttatccgtaatttgctaatatgaaaacaatgagttcatggttattgttttagctctttgcaacctg

SEQ ID NO: 3868 - DNA, 200 bp, Kochia scoparia
caggttgcaaagagctaaaacaataaccatgaactcattgttttcatattagcaaattacggataacataatcctgagtcataaaagtaggcaccaaatgtagtttttgttcctccacagtccacaccatgaggtccatgacaccacaaaggcacaaacattgaacaaaaagcattgcgtgcagagttgactctttacat

SEQ ID NO: 3869 - DNA, 200 bp, Kochia scoparia
tattgttttagctctttgcaacctgaattataagttgttttctactagcatttgatgtttaatgttatcatttacatagcaagttgaatatttataggtcactggagatcctggaaagataattgctgtgctaagaaatctaagcaagtttggaattagagaaattgctcgtactggaaaggtttgttttaagttgttca

SEQ ID NO: 3870 - DNA, 200 bp, Kochia scoparia
tgaacaacttaaaacaaacctttccagtacgagcaatttctctaattccaaacttgcttagatttcttagcacagcaattatctttccaggatctccagtgacctataaatattcaacttgctatgtaaatgataacattaaacatcaaatgctagtagaaaacaacttataattcaggttgcaaagagctaaaacaata

SEQ ID NO: 3871 - DNA, 200 bp, Kochia scoparia
ggaaaggtttgttttaagttgttcagtttctgcattgcatgtcgtatttcattgaagagttggaaacttttcatgtatttctgtatatgatttgaaatgttgatattatccttcacagatcgctctaagaagggaaaagttgggtgaaactgctcctttctggcgtttttctgcagcttcttatcctgatcttggagaag

SEQ ID NO: 3872 - DNA, 200 bp, Kochia scoparia
cttctccaagatcaggataagaagctgcagaaaaacgccagaaaggagcagtttcacccaacttttcccttcttagagcgatctgtgaaggataatatcaacatttcaaatcatatacagaaatacatgaaaagtttccaactcttcaatgaaatacgacatgcaatgcagaaactgaacaacttaaaacaaacctttcc

SEQ ID NO: 3873 - DNA, 200 bp, Kochia scoparia
gcttcttatcctgatcttggagaagctatgtctgaggatgccctccctgaaatttcaagacgagctcctgagactgaatcatcagatttatctgttgaagtatgttctttgatagctctccttatttttggcaactaatttatgtttgtgtatttactttatgctttcttttgatgaagtctataaagaacttgaccttc

SEQ ID NO: 3874 - DNA, 200 bp, Kochia scoparia
gaaggtcaagttctttatagacttcatcaaaagaaagcataaagtaaatacacaaacataaattagttgccaaaaataaggagagctatcaaagaacatacttcaacagataaatctgatgattcagtctcaggagctcgtcttgaaatttcagggagggcatcctcagacatagcttctccaagatcaggataagaagc

SEQ ID NO: 3875 - DNA, 200 bp, Kochia scoparia
gaagtctataaagaacttgaccttctgcatagttagaaactatgttatttagactcttcattttacctgaagtacccgtgttggatccttgaatctcggacatgggtagactctcggacatgggtacgatacttggacacttcattttgagctaaaatcttggtatttttccaaaaattagcctagttggacacttggaa

SEQ ID NO: 3876 - DNA, 200 bp, Kochia scoparia
ttccaagtgtccaactaggctaatttttggaaaaataccaagattttagctcaaaatgaagtgtccaagtatcgtacccatgtccgagagtctacccatgtccgagattcaaggatccaacacgggtacttcaggtaaaatgaagagtctaaataacatagtttctaactatgcagaaggtcaagttctttatagacttc

SEQ ID NO: 3877 - DNA, 200 bp, Kochia scoparia
aattagcctagttggacacttggaaacgtacccgtgtcggacataggtatacatgtccaagtaacacatgttagaaatctttggagcttgtttcacaagctgttaagattgctcaaggtgtcaaggcctcatctcacttattaatacagagttgttttgttagaagtctcagaaacttataaaccaggctgaaatttgaa

SEQ ID NO: 3878 - DNA, 200 bp, Kochia scoparia
ttcaaatttcagcctggtttataagtttctgagacttctaacaaaacaactctgtattaataagtgagatgaggccttgacaccttgagcaatcttaacagcttgtgaaacaagctccaaagatttctaacatgtgttacttggacatgtatacctatgtccgacacgggtacgtttccaagtgtccaactaggctaatt

SEQ ID NO: 3879 - DNA, 200 bp, Kochia scoparia
cttataaaccaggctgaaatttgaaaagataggctagtataatactttgctgtttttctctcaaaaaagttctaaaacgacaaagagggctagtaatattagagaattactgatttaggacaagggctaatgaatgagtcttgataagttcagataagggtcaataagtttaaatgaggttagataagggctgagaagtt

SEQ ID NO: 3880 - DNA, 200 bp, Kochia scoparia
aacttctcagcccttatctaacctcatttaaacttattgacccttatctgaacttatcaagactcattcattagcccttgtcctaaatcagtaattctctaatattactagccctctttgtcgttttagaacttttttgagagaaaaacagcaaagtattatactagcctatcttttcaaatttcagcctggtttataag

SEQ ID NO: 3881 - DNA, 200 bp, Kochia scoparia
gaggttagataagggctgagaagttcatattatgataatagttcaaataatggattagtgaaggaacaaaggtgaaagatagtgatttaagttcctagggatgcacaattaccatgattattgatacaacaacaatgcacgattctatagctgaaaggggatctttatgctgcaattcatcttccttgggtcatcttttc

SEQ ID NO: 3882 - DNA, 200 bp, Kochia scoparia
gaaaagatgacccaaggaagatgaattgcagcataaagatcccctttcagctatagaatcgtgcattgttgttgtatcaataatcatggtaattgtgcatccctaggaacttaaatcactatctttcacctttgttccttcactaatccattatttgaactattatcataatatgaacttctcagcccttatctaacctc

SEQ ID NO: 3883 - DNA, 200 bp, Kochia scoparia
ttcatcttccttgggtcatcttttccattaaagagaataatttcctggtgagaagagaaatcacgagaggaagtatgaaacttccttataggacatagaacagattggacactccaggaatgaaaaaataatgctctaatgaacttgcatatcaccatatttgttgaggcaaacttaactcctgactatataatcatata

SEQ ID NO: 3884 - DNA, 200 bp, Kochia scoparia
tatatgattatatagtcaggagttaagtttgcctcaacaaatatggtgatatgcaagttcattagagcattattttttcattcctggagtgtccaatctgttctatgtcctataaggaagtttcatacttcctctcgtgatttctcttctcaccaggaaattattctctttaatggaaaagatgacccaaggaagatgaa

SEQ ID NO: 3885 - DNA, 200 bp, Kochia scoparia
taactcctgactatataatcatatagtcagactgttttaggattctaaacaattgcagataattgtgttcatgcttggtcgaaaagtttttctgcattatatttgaaacaaattatgtcagcaggtgataaataaattgtgccatgctacagaaagcgaaaaaattcatacattgatttatttaaggtaattcttcagat

SEQ ID NO: 3886 - DNA, 200 bp, Kochia scoparia
atctgaagaattaccttaaataaatcaatgtatgaattttttcgctttctgtagcatggcacaatttatttatcacctgctgacataatttgtttcaaatataatgcagaaaaacttttcgaccaagcatgaacacaattatctgcaattgtttagaatcctaaaacagtctgactatatgattatatagtcaggagtta

SEQ ID NO: 3887 - DNA, 200 bp, Kochia scoparia
atttatttaaggtaattcttcagattgtaatgtgtacttctacagattatggagcctcccacaattgttgtgaagatgtccactggtttaggattgttatgtctaattttttttccatgacctaatttatcacttattttcgaaaattgaactgctatttccactataattcgctgcttctccactaattcatataactt

SEQ ID NO: 3888 - DNA, 200 bp, Kochia scoparia
aagttatatgaattagtggagaagcagcgaattatagtggaaatagcagttcaattttcgaaaataagtgataaattaggtcatggaaaaaaaattagacataacaatcctaaaccagtggacatcttcacaacaattgtgggaggctccataatctgtagaagtacacattacaatctgaagaattaccttaaataaat

SEQ ID NO: 3889 - DNA, 200 bp, Kochia scoparia
gcttctccactaattcatataacttctccacttaacttctccttaaactacttaatgaactactttcccccttcatgaagatgtcttccaagaacatggagtccatgcgagtcgtttgctggccatggatttggggacatctttttgtcacgaattttgtattgtatctctgtgttattgggaatatgctacaaagacac

SEQ ID NO: 3890 - DNA, 200 bp, Kochia scoparia
gtgtctttgtagcatattcccaataacacagagatacaatacaaaattcgtgacaaaaagatgtccccaaatccatggccagcaaacgactcgcatggactccatgttcttggaagacatcttcatgaagggggaaagtagttcattaagtagtttaaggagaagttaagtggagaagttatatgaattagtggagaagc

SEQ ID NO: 3891 - DNA, 200 bp, Kochia scoparia
tattgggaatatgctacaaagacactatttagtgtttgcctaattatattgactcaatgagatatacttctatagttatatacttatatactaatcaatgcccattcatgggttaaaattttgatattacagggtgatgtttacccagtggaaccttttgatggttttgcagttccacaagtccttgatgctcactgggg

SEQ ID NO: 3892 - DNA, 200 bp, Kochia scoparia
ccccagtgagcatcaaggacttgtggaactgcaaaaccatcaaaaggttccactgggtaaacatcaccctgtaatatcaaaattttaacccatgaatgggcattgattagtatataagtatataactatagaagtatatctcattgagtcaatataattaggcaaacactaaatagtgtctttgtagcatattcccaata

SEQ ID NO: 3893 - DNA, 200 bp, Kochia scoparia
cacaagtccttgatgctcactggggtgtcttgaacgttgaagatgtaagtgaccctcttgttttcttcaattaaattattctacatttctattgtatgctttcagggtttctgttcatttttttaattaattctgtacttaggtctcattactctcttagtctcttgagctcttaatttacagctgtaatggccccctct

SEQ ID NO: 3894 - DNA, 200 bp, Kochia scoparia
agagggggccattacagctgtaaattaagagctcaagagactaagagagtaatgagacctaagtacagaattaattaaaaaaatgaacagaaaccctgaaagcatacaatagaaatgtagaataatttaattgaagaaaacaagagggtcacttacatcttcaacgttcaagacaccccagtgagcatcaaggacttgtg

SEQ ID NO: 3895 - DNA, 200 bp, Kochia scoparia
atttacagctgtaatggccccctctttgtttcattgccaactatgttggcagatgatgtgggataaggcaatgatattctgaatttaattgaatgttgagtaaaatggatgtgtagttggcaagaagcatttgttttggttggggttaaggtgtttgggcggaaatttagtaacgctagcatgaatatattaaaaaccat

SEQ ID NO: 3896 - DNA, 200 bp, Kochia scoparia
atggtttttaatatattcatgctagcgttactaaatttccgcccaaacaccttaaccccaaccaaaacaaatgcttcttgccaactacacatccattttactcaacattcaattaaattcagaatatcattgccttatcccacatcatctgccaacatagttggcaatgaaacaaagagggggccattacagctgtaaat

SEQ ID NO: 3897 - DNA, 200 bp, Kochia scoparia
ctagcatgaatatattaaaaaccattaaaatttcgtatacttgtatgaactatgaagtatttccttatctctgaaatttctctgatagctgtactagctatatacaatgtctacaagttttaatatggttgaattattaaattcataaagatgcttagcacaaaaattttatttagtggtttttcctattctaaaccaga

SEQ ID NO: 3898 - DNA, 200 bp, Kochia scoparia
tctggtttagaataggaaaaaccactaaataaaatttttgtgctaagcatctttatgaatttaataattcaaccatattaaaacttgtagacattgtatatagctagtacagctatcagagaaatttcagagataaggaaatacttcatagttcatacaagtatacgaaattttaatggtttttaatatattcatgctag

SEQ ID NO: 3899 - DNA, 200 bp, Kochia scoparia
gtggtttttcctattctaaaccagataactaagttcagactgcaatcaagcttagcagtagcacaaaatgctagaaaagcaaaacttattataatttcttttctgtcgagacttttttacaggcttatctagttatttgtgatgtttggtatgtccactctataatttgatagaatgatagagtaactgtttgctatgtc

SEQ ID NO: 3900 - DNA, 200 bp, Kochia scoparia
gacatagcaaacagttactctatcattctatcaaattatagagtggacataccaaacatcacaaataactagataagcctgtaaaaaagtctcgacagaaaagaaattataataagttttgcttttctagcattttgtgctactgctaagcttgattgcagtctgaacttagttatctggtttagaataggaaaaaccac

SEQ ID NO: 3901 - DNA, 200 bp, Kochia scoparia
tgatagagtaactgtttgctatgtccacgaggtaaccaattgtaaaaatttaaatgtatatgaggacactggagcaacctaatgtttggacatatgtatgcagacaagtgggatgcgatcacacactctttcgctgcttgttaacgacaaacctggggtccttaatgttgttacaggggtttttgctcgaaggggttata

SEQ ID NO: 3902 - DNA, 200 bp, Kochia scoparia
tataaccccttcgagcaaaaacccctgtaacaacattaaggaccccaggtttgtcgttaacaagcagcgaaagagtgtgtgatcgcatcccacttgtctgcatacatatgtccaaacattaggttgctccagtgtcctcatatacatttaaatttttacaattggttacctcgtggacatagcaaacagttactctatca

SEQ ID NO: 3903 - DNA, 200 bp, Kochia scoparia
ggggtttttgctcgaaggggttataatattcaggtgtgagtcaattcttactctgcatgatacaatttaagttctgctgtcactagctaagtttatattgctgatttttctggttttcagagtttagctgtgggccatgcagaaggggagggtctatctcggattactactgttgtacctggtacagatgaatcaattag

SEQ ID NO: 3904 - DNA, 200 bp, Kochia scoparia
ctaattgattcatctgtaccaggtacaacagtagtaatccgagatagaccctccccttctgcatggcccacagctaaactctgaaaaccagaaaaatcagcaatataaacttagctagtgacagcagaacttaaattgtatcatgcagagtaagaattgactcacacctgaatattataaccccttcgagcaaaaacccc

SEQ ID NO: 3905 - DNA, 200 bp, Kochia scoparia
tacctggtacagatgaatcaattagcaaattggtgcaacaaatttataagctagttgatattcatgaggtgagaatatctattcatttgatcgttgttacccacaatatttctatttttgactcatactcataatttattatattatgctattttatttctgactttaggaagctgcaaacatggaaagaattttgtatg

SEQ ID NO: 3906 - DNA, 200 bp, Kochia scoparia
catacaaaattctttccatgtttgcagcttcctaaagtcagaaataaaatagcataatataataaattatgagtatgagtcaaaaatagaaatattgtgggtaacaacgatcaaatgaatagatattctcacctcatgaatatcaactagcttataaatttgttgcaccaatttgctaattgattcatctgtaccaggta

SEQ ID NO: 3907 - DNA, 200 bp, Kochia scoparia
gcaaacatggaaagaattttgtatgagttttgacgtcagtattttagttgtaacgaatgtctttgggtgtttctagcatgtttgaaagctaatgttatttgtttaaaatttaatctatttatatttttatccaggttagagatatcacccatctgccatttgctgagcgagagttgatgttggtgaaggttgccgtgaat

SEQ ID NO: 3908 - DNA, 200 bp, Kochia scoparia
attcacggcaaccttcaccaacatcaactctcgctcagcaaatggcagatgggtgatatctctaacctggataaaaatataaatagattaaattttaaacaaataacattagctttcaaacatgctagaaacacccaaagacattcgttacaactaaaatactgacgtcaaaactcatacaaaattctttccatgtttgc

SEQ ID NO: 3909 - DNA, 200 bp, Kochia scoparia
gatgttggtgaaggttgccgtgaatactgctgcacgccgtgaggtccttgacattgctggcatttttagagctaaagctgtcgatgtatctgatcataccataacacttgaggtaataatcaattcggaaggttgctcaaaaatattgttgactccgtttcaaatgcaacttttttaatttgatgttttgatataattgc

SEQ ID NO: 3910 - DNA, 200 bp, Kochia scoparia
gcaattatatcaaaacatcaaattaaaaaagttgcatttgaaacggagtcaacaatatttttgagcaaccttccgaattgattattacctcaagtgttatggtatgatcagatacatcgacagctttagctctaaaaatgccagcaatgtcaaggacctcacggcgtgcagcagtattcacggcaaccttcaccaacatc

SEQ ID NO: 3911 - DNA, 200 bp, Kochia scoparia
taatttgatgttttgatataattgctaccctcttgtttatagcatgttttaaaaatcaaagtttgggcaattttcttaactatcttaactacagtactacctctgtgttttttagatgtcccactttgggttttgtgatttttaaggtaacattttggtgtaggtgattaggtgagtagatgggtaatttaataaagtat

SEQ ID NO: 3912 - DNA, 200 bp, Kochia scoparia
atactttattaaattacccatctactcacctaatcacctacaccaaaatgttaccttaaaaatcacaaaacccaaagtgggacatctaaaaaacacagaggtagtactgtagttaagatagttaagaaaattgcccaaactttgatttttaaaacatgctataaacaagagggtagcaattatatcaaaacatcaaatta

SEQ ID NO: 3913 - DNA, 200 bp, Kochia scoparia
tagtggaagagatgaaatgtctagttatggaattatggttgatgattttggtttctggtttggtaaacggaggtttaattctctggctagttttgcattgatgaacaaagtcattgcccaagccaccaactgttttcatttgaaggaggctccccgactcatgtatttttcagccatgaatctcgatcaagtgattaatt

SEQ ID NO: 3914 - DNA, 200 bp, Kochia scoparia
aattaatcacttgatcgagattcatggctgaaaaatacatgagtcggggagcctccttcaaatgaaaacagttggtggcttgggcaatgactttgttcatcaatgcaaaactagccagagaattaaacctccgtttaccaaaccagaaaccaaaatcatcaaccataattccataactagacatttcatctcttccacta

SEQ ID NO: 3915 - DNA, 200 bp, Kochia scoparia
atgaatctcgatcaagtgattaatttgatcttaggtcattcatattgctcttgttgttcgcatggtttttttacaactttctagcattcagactatggtaatttcttttttcatgccaacacttccatcatttgtcataacctattgcttgacgaagattctgtgtaatgacatgtgcttgagtttccacttattcacaa

SEQ ID NO: 3916 - DNA, 200 bp, Kochia scoparia
ttgtgaataagtggaaactcaagcacatgtcattacacagaatcttcgtcaagcaataggttatgacaaatgatggaagtgttggcatgaaaaaagaaattaccatagtctgaatgctagaaagttgtaaaaaaaccatgcgaacaacaagagcaatatgaatgacctaagatcaaattaatcacttgatcgagattcat

SEQ ID NO: 3917 - DNA, 200 bp, Kochia scoparia
tgcttgagtttccacttattcacaacaaccaagttgtgagaagttgatgatttatagggcgtgtttgacaatagtagctggcactgggcgtttagttgtggaaatagttggtagtgctaacattggtagttagcggtagtagtagatgttaagtgtcaacaagggattatacaatctaataatttggcaatggtaacagt

SEQ ID NO: 3918 - DNA, 200 bp, Kochia scoparia
actgttaccattgccaaattattagattgtataatcccttgttgacacttaacatctactactaccgctaactaccaatgttagcactaccaactatttccacaactaaacgcccagtgccagctactattgtcaaacacgccctataaatcatcaacttctcacaacttggttgttgtgaataagtggaaactcaagca

SEQ ID NO: 3919 - DNA, 200 bp, Kochia scoparia
ctaataatttggcaatggtaacagttgtatatataataaaagaaaaatggtataagaagaaaaaattgtacccgctacatgacaaatgttagtcctagtgttgagcaatattctctttaagcacttacctctatccgaaacattattttgccaaaccataatttaaattaccaagtagtgttttgatctagtcataccac

SEQ ID NO: 3920 - DNA, 200 bp, Kochia scoparia
gtggtatgactagatcaaaacactacttggtaatttaaattatggtttggcaaaataatgtttcggatagaggtaagtgcttaaagagaatattgctcaacactaggactaacatttgtcatgtagcgggtacaattttttcttcttataccatttttcttttattatatatacaactgttaccattgccaaattattag

SEQ ID NO: 3921 - DNA, 200 bp, Kochia scoparia
tagtgttttgatctagtcataccactaaatgctatcttatactcctacgccgatcacgcccatagcataggtgaaactatataaaaaaaaatgctaatgaaatgcccctatcccaaaacaaaataaatgcattgtaacccaagtattagtagatttgatcatggtatttggtcgattttgattaatggctgtagttccca

SEQ ID NO: 3922 - DNA, 200 bp, Kochia scoparia
tgggaactacagccattaatcaaaatcgaccaaataccatgatcaaatctactaatacttgggttacaatgcatttattttgttttgggataggggcatttcattagcatttttttttatatagtttcacctatgctatgggcgtgatcggcgtaggagtataagatagcatttagtggtatgactagatcaaaacacta

SEQ ID NO: 3923 - DNA, 200 bp, Kochia scoparia
ttttgattaatggctgtagttcccaagtgcaataggaatcttctttggtgaatgtacccacgaccctgaaaagccttgaattttgcatttattgtaatcaatcaatcaatcaaagccttattatcatatgtggggtcgaacatgaaccaaaagtgattattccaggaggtcatccatatagattttcctcctctattctc

SEQ ID NO: 3924 - DNA, 200 bp, Kochia scoparia
gagaatagaggaggaaaatctatatggatgacctcctggaataatcacttttggttcatgttcgaccccacatatgataataaggctttgattgattgattgattacaataaatgcaaaattcaaggcttttcagggtcgtgggtacattcaccaaagaagattcctattgcacttgggaactacagccattaatcaaaa

SEQ ID NO: 3925 - DNA, 200 bp, Kochia scoparia
atatagattttcctcctctattctctacgatcgagagcctcactcttgcaaatccaactgtttcaaatcctttctaactcctccactttatggtaatcattgtataaaaaaacaaaaaacaaaaaacaaagaaagaaaaagaaagaaagaaaagaaaggagatcaaagggcataatagttaattatgatgccaagtaaaa

SEQ ID NO: 3926 - DNA, 200 bp, Kochia scoparia
ttttacttggcatcataattaactattatgccctttgatctcctttcttttctttctttctttttctttctttgttttttgttttttgtttttttatacaatgattaccataaagtggaggagttagaaaggatttgaaacagttggatttgcaagagtgaggctctcgatcgtagagaatagaggaggaaaatctatat

SEQ ID NO: 3927 - DNA, 200 bp, Kochia scoparia
tagttaattatgatgccaagtaaaaaattagtctgggtcttgggaaatagtgatgtgacaatgaagaggttaacggatgatggtttattccactggaatttgttctaattgttcgtctttcaaaccttgtttgagttatttagttgccttttggtgttgttcaaatcaatttattatcgtgaatttgtgatgactgagat

SEQ ID NO: 3928 - DNA, 200 bp, Kochia scoparia
atctcagtcatcacaaattcacgataataaattgatttgaacaacaccaaaaggcaactaaataactcaaacaaggtttgaaagacgaacaattagaacaaattccagtggaataaaccatcatccgttaacctcttcattgtcacatcactatttcccaagacccagactaattttttacttggcatcataattaacta

SEQ ID NO: 3929 - DNA, 200 bp, Kochia scoparia
atcgtgaatttgtgatgactgagataggtgttttcacaacgtatttggtctagaactagtcacaactcgcattttgtttgtggtatgtgtagtagtgacggtgtttccacgggagaaacagagtgatgctgcgtttgcatgcattattgtttttggtatcatctttgtttctgattcaatgtttggaattgaaatggaga

SEQ ID NO: 3930 - DNA, 200 bp, Kochia scoparia
tctccatttcaattccaaacattgaatcagaaacaaagatgataccaaaaacaataatgcatgcaaacgcagcatcactctgtttctcccgtggaaacaccgtcactactacacataccacaaacaaaatgcgagttgtgactagttctagaccaaatacgttgtgaaaacacctatctcagtcatcacaaattcacgat

SEQ ID NO: 3931 - DNA, 200 bp, Kochia scoparia
tcaatgtttggaattgaaatggagattacttcctagttgtttaaatatcttatttgtgattcaggaagttgagtttggtttaaaatgtatgtatctttggattttagaaaaagccaagggaggtcaaatgcccaaatgtgacttgtgatgaagggaattaaaagagatatggagaaagtaggatcatagagctctggata

SEQ ID NO: 3932 - DNA, 200 bp, Kochia scoparia
tatccagagctctatgatcctactttctccatatctcttttaattcccttcatcacaagtcacatttgggcatttgacctcccttggctttttctaaaatccaaagatacatacattttaaaccaaactcaacttcctgaatcacaaataagatatttaaacaactaggaagtaatctccatttcaattccaaacattga

SEQ ID NO: 3933 - DNA, 200 bp, Kochia scoparia
aagtaggatcatagagctctggatagaggtgaatggaggaagaggtccttattgatgattgtaaaatataaattcttgattcatgcaaccgttattcgttaaacaatatcaaagctttgttataattcttaaggctgtagtgtttccttgtagaaatgctgtaatctgcaaattttgcacatttaatgaattatatgatg

SEQ ID NO: 3934 - DNA, 200 bp, Kochia scoparia
catcatataattcattaaatgtgcaaaatttgcagattacagcatttctacaaggaaacactacagccttaagaattataacaaagctttgatattgtttaacgaataacggttgcatgaatcaagaatttatattttacaatcatcaataaggacctcttcctccattcacctctatccagagctctatgatcctactt

SEQ ID NO: 3935 - DNA, 200 bp, Kochia scoparia
tgcacatttaatgaattatatgatgggttatctttaaattgtctataatcttaattgtggttgtttaaaatgtctaagggcaagacgacataccatttcagtatttgttggggatgagagtggaatgataaatcgaattgctggggtcttcgctagaaggggttataatattgaatctcttgctgttggattgaacaagg

SEQ ID NO: 3936 - DNA, 200 bp, Kochia scoparia
ccttgttcaatccaacagcaagagattcaatattataaccccttctagcgaagaccccagcaattcgatttatcattccactctcatccccaacaaatactgaaatggtatgtcgtcttgcccttagacattttaaacaaccacaattaagattatagacaatttaaagataacccatcatataattcattaaatgtgca

SEQ ID NO: 3937 - DNA, 200 bp, Kochia scoparia; identical to SEQ ID NO: 3855

SEQ ID NO: 3938 - DNA, 200 bp, Kochia scoparia; identical to SEQ ID NO: 3856

SEQ ID NO: 3939 - DNA, 200 bp, Kochia scoparia; identical to SEQ ID NO: 3857

SEQ ID NO: 3940 - DNA, 200 bp, Kochia scoparia; identical to SEQ ID NO: 3858

SEQ ID NO: 3941 - DNA, 200 bp, Kochia scoparia
tcttgcttgtcagaaaatttcgtttagttgtagctaattattttgaaatagtaaatttgttgtatgctaatcttccgccatcattcatcctgattgaactttactgtacaagtatctttaaatctttgagctgagtgaattctaatttataatgtttgctacttatataataacttttgttatttccttttgatactgca

SEQ ID NO: 3942 - DNA, 200 bp, Kochia scoparia
tgcagtatcaaaaggaaataacaaaagttattatataagtagcaaacattataaattagaattcactcagctcaaagatttaaagatacttgtacagtaaagttcaatcaggatgaatgatggcggaagattagcatacaacaaatttactatttcaaaataattagctacaactaaacgaaattttctgacaagcaaga

SEQ ID NO: 3943 - DNA, 200 bp, Kochia scoparia
tttgttatttccttttgatactgcagttaatgtggttggtggacatcttccgtgctaaaattgtggatatttcagaagaaaatcttacgatggaggtatcactggaaacattatgcagattaagacaaatttctaaagaactatgtaatcatcctaacgaggattgacttccaagaatttaacacatgttatctgcttta

SEQ ID NO: 3944 - DNA, 200 bp, Kochia scoparia
taaagcagataacatgtgttaaattcttggaagtcaatcctcgttaggatgattacatagttctttagaaatttgtcttaatctgcataatgtttccagtgatacctccatcgtaagattttcttctgaaatatccacaattttagcacggaagatgtccaccaaccacattaactgcagtatcaaaaggaaataacaaa

SEQ ID NO: 3945 - DNA, 200 bp, Kochia scoparia
aatttaacacatgttatctgctttatttttcagtagtctttgatgctttaggtgcatttgaataatttctgttttaatatatattctaataatgttatagttactgtatgtgattctatgatccaggagatgtaacttaagtattttgttttgcttggtgcatacccatttacttcctggaaatatttcatgtagcttgt

SEQ ID NO: 3946 - DNA, 200 bp, Kochia scoparia
acaagctacatgaaatatttccaggaagtaaatgggtatgcaccaagcaaaacaaaatacttaagttacatctcctggatcatagaatcacatacagtaactataacattattagaatatatattaaaacagaaattattcaaatgcacctaaagcatcaaagactactgaaaaataaagcagataacatgtgttaaatt

SEQ ID NO: 3947 - DNA, 200 bp, Kochia scoparia
cctggaaatatttcatgtagcttgtgtcatttatatacttgatcaaacaaggtccgaaaggaagtcatttgagcaacaacttttaacaaccaaggtcccttttttttttttttttttttctcattctaaaactctaatctcacaaactgcaatcttttaggaacaaagggagacctcctccacctaatatttcttttaaa

SEQ ID NO: 3948 - DNA, 200 bp, Kochia scoparia
tttaaaagaaatattaggtggaggaggtctccctttgttcctaaaagattgcagtttgtgagattagagttttagaatgagaaaaaaaaaaaaaaaaaaaagggaccttggttgttaaaagttgttgctcaaatgacttcctttcggaccttgtttgatcaagtatataaatgacacaagctacatgaaatatttccagg

SEQ ID NO: 3949 - DNA, 200 bp, Kochia scoparia
tcctccacctaatatttcttttaaaccaaagacattttaggataaattgagaagcttttagaacaagaggaaatcagcaacacttaatgttctttcttggtcatgatggacatgaatgaggaatctttggatgatgctcccgtagcttttagtccttatttaactttatgtattttgggttgttttgagtctttgtctct

SEQ ID NO: 3950 - DNA, 200 bp, Kochia scoparia
agagacaaagactcaaaacaacccaaaatacataaagttaaataaggactaaaagctacgggagcatcatccaaagattcctcattcatgtccatcatgaccaagaaagaacattaagtgttgctgatttcctcttgttctaaaagcttctcaatttatcctaaaatgtctttggtttaaaagaaatattaggtggagga

SEQ ID NO: 3951 - DNA, 200 bp, Kochia scoparia
tgggttgttttgagtctttgtctctcccttgggttttgttgtgttttttagcttaatggtccttttgctttttaattggctctctttgacttttgttggttttgtcgtggggttccttggggctcttctccccttgtgttcccttgtactcttttacttttggtaatgaatttctttatataccaattataatagtaata

SEQ ID NO: 3952 - DNA, 200 bp, Kochia scoparia
tattactattataattggtatataaagaaattcattaccaaaagtaaaagagtacaagggaacacaaggggagaagagccccaaggaaccccacgacaaaaccaacaaaagtcaaagagagccaattaaaaagcaaaaggaccattaagctaaaaaacacaacaaaacccaagggagagacaaagactcaaaacaaccca

SEQ ID NO: 3953 - DNA, 200 bp, Kochia scoparia
ttatataccaattataatagtaataataataataaagaaccagtgacaataggtttagtcaccaaaagtttttagacttgcaacatagaatattatacacattaaaacacaatagtaaaactaaaactaaaacgcctaccaattggtggtttcttctcttttgagaacttttccagagcatcccaatctcttattgtagc

SEQ ID NO: 3954 - DNA, 200 bp, Kochia scoparia
gctacaataagagattgggatgctctggaaaagttctcaaaagagaagaaaccaccaattggtaggcgttttagttttagttttactattgtgttttaatgtgtataatattctatgttgcaagtctaaaaacttttggtgactaaacctattgtcactggttctttattattattattactattataattggtatataa

SEQ ID NO: 3955 - DNA, 200 bp, Kochia scoparia
gagcatcccaatctcttattgtagcaagtgcaaacaccttaagccaataccatcttttctcagaaacctggaaaagagtggcaatgtcaagtagacaatttaaacaaagtagcaactcgtcgacaaaagaaataaggattgaacgaacatgtatcttgttgcttataaaaagaagaaacaaattacataccttgaattca

SEQ ID NO: 3956 - DNA, 200 bp, Kochia scoparia
tgaattcaaggtatgtaatttgtttcttctttttataagcaacaagatacatgttcgttcaatccttatttcttttgtcgacgagttgctactttgtttaaattgtctacttgacattgccactcttttccaggtttctgagaaaagatggtattggcttaaggtgtttgcacttgctacaataagagattgggatgctc

SEQ ID NO: 3957 - DNA, 200 bp, Kochia scoparia
aaacaaattacataccttgaattcatttttcaccctcaaagcagctcgatgatttccgagtacaatgcatgtgcgaatcgtgtcactgatgcttgaatctacaaagattgcttgctttgtggatacctcaagctcatgctgcattctattatggtagaaaaattaaattttaaacacacatgaacaagaaaattcataaa

SEQ ID NO: 3958 - DNA, 200 bp, Kochia scoparia
tttatgaattttcttgttcatgtgtgtttaaaatttaatttttctaccataatagaatgcagcatgagcttgaggtatccacaaagcaagcaatctttgtagattcaagcatcagtgacacgattcgcacatgcattgtactcggaaatcatcgagctgctttgagggtgaaaaatgaattcaaggtatgtaatttgttt

SEQ ID NO: 3959 - DNA, 200 bp, Kochia scoparia
acacatgaacaagaaaattcataaactaaaagcttatatttaatcttgttcagttatgcattaagtgaaaatatcacccccacaggatacaaggaacaaaaacaactgaacatgagagataaagggctgataattgcgagatgacaataaagatgacaataaaagagcaagataaataatcttgttccccacaggataca

SEQ ID NO: 3960 - DNA, 200 bp, Kochia scoparia
tgtatcctgtggggaacaagattatttatcttgctcttttattgtcatctttattgtcatctcgcaattatcagccctttatctctcatgttcagttgtttttgttccttgtatcctgtgggggtgatattttcacttaatgcataactgaacaagattaaatataagcttttagtttatgaattttcttgttcatgtgt

SEQ ID NO: 3961 - DNA, 200 bp, Kochia scoparia
ataatcttgttccccacaggatacaaggaacaaaaactattgcgagatgacaataaaagagctcttttattgtcatcctttatcttgctctttttctgcgttcagcaagttttttccatcgttatttgagatggatgtgtgggaatactatgagagatagaatcaaaaatgaagttatctatgggaaagttggtgttgca

SEQ ID NO: 3962 - DNA, 200 bp, Kochia scoparia
tgcaacaccaactttcccatagataacttcatttttgattctatctctcatagtattcccacacatccatctcaaataacgatggaaaaaacttgctgaacgcagaaaaagagcaagataaaggatgacaataaaagagctcttttattgtcatctcgcaatagtttttgttccttgtatcctgtggggaacaagattat

SEQ ID NO: 3963 - DNA, 200 bp, Kochia scoparia
tatctatgggaaagttggtgttgcagatattgcaagtaaagtaagatgaaggaaaaccgtttgcattggtttggtcatgtaagacggagatctcaagaggcaccggtgcaaagagtagaaaactgggatcagagtatttttaaatgaggtagagggagaccgagaatgacttggtgagaaggagttaaaagggatctaca

SEQ ID NO: 3964 - DNA, 200 bp, Kochia scoparia
tgtagatcccttttaactccttctcaccaagtcattctcggtctccctctacctcatttaaaaatactctgatcccagttttctactctttgcaccggtgcctcttgagatctccgtcttacatgaccaaaccaatgcaaacggttttccttcatcttactttacttgcaatatctgcaacaccaactttcccatagata

SEQ ID NO: 3965 - DNA, 200 bp, Kochia scoparia
gagaaggagttaaaagggatctacaagcgaatgaggctcttgattgtagggggtggaggaggaaaatatttgttgatgacttccctaaatactcacttttggttcatgttagtcgaccccacttatgggactaaggctttgattgattgattgacttgtcgtgcactgtttatttttttataaaaaattcttttctttta

SEQ ID NO: 3966 - DNA, 200 bp, Kochia scoparia
taaaagaaaagaattttttataaaaaaataaacagtgcacgacaagtcaatcaatcaatcaaagccttagtcccataagtggggtcgactaacatgaaccaaaagtgagtatttagggaagtcatcaacaaatattttcctcctccaccccctacaatcaagagcctcattcgcttgtagatcccttttaactccttctc

SEQ ID NO: 3967 - DNA, 200 bp, Kochia scoparia
ttttataaaaaattcttttcttttattacatgttttaaaaattattcgacaaatcctttggtgaattacataagaatttatgctattatcttggtgtatctcttatgtaaataattttccatgttatagctatgttttttgatcagctttctctatgtcgcacaaggtagaaccaaaccaagagttccgaggattggtgt

SEQ ID NO: 3968 - DNA, 200 bp, Kochia scoparia
acaccaatcctcggaactcttggtttggttctaccttgtgcgacatagagaaagctgatcaaaaaacatagctataacatggaaaattatttacataagagatacaccaagataatagcataaattcttatgtaattcaccaaaggatttgtcgaataatttttaaaacatgtaataaaagaaaagaattttttataaaa

SEQ ID NO: 3969 - DNA, 200 bp, Kochia scoparia
aaccaagagttccgaggattggtgtgtgaaggagctaatgttctcccttccaagtttgtagaggattcacttcgtgatggatatggtaggattctctctctctttgatttttatattggaatacctgacccttctctccattaaattaaattttgtcatcaagctgtgcaggaaaagttgtcaatattaggcatttggat

SEQ ID NO: 3970 - DNA, 200 bp, Kochia scoparia
atccaaatgcctaatattgacaacttttcctgcacagcttgatgacaaaatttaatttaatggagagaagggtcaggtattccaatataaaaatcaaagagagagagaatcctaccatatccatcacgaagtgaatcctctacaaacttggaagggagaacattagctccttcacacaccaatcctcggaactcttggtt

SEQ ID NO: 3971 - DNA, 200 bp, Kochia scoparia
agttgtcaatattaggcatttggataaagtaattgactccatcaatgggtggtacatggagcgaggcctctttggcatggttaatatctcatttctttctgttgtttaagacttctggatcagcctctttcattgcctatccttattttgttaaggcttgagcgcggcaatgttttggagcaggagattcaatgttttat

SEQ ID NO: 3972 - DNA, 200 bp, Kochia scoparia
ataaaacattgaatctcctgctccaaaacattgccgcgctcaagccttaacaaaataaggataggcaatgaaagaggctgatccagaagtcttaaacaacagaaagaaatgagatattaaccatgccaaagaggcctcgctccatgtaccacccattgatggagtcaattactttatccaaatgcctaatattgacaact

SEQ ID NO: 3973 - DNA, 200 bp, Kochia scoparia
tggagcaggagattcaatgttttattcctacaggtttcaggtgttgagatcctttcaggaggtatactaaggttacaaattgctgaagctgaggtcaatgatgtttcaattcgtttccttgatcggaagacgtaagtgataattttcatatttggtactaaaacgagtgaaaaaggaacagtggagtctcgatcatctca

SEQ ID NO: 3974 - DNA, 200 bp, Kochia scoparia
tgagatgatcgagactccactgttcctttttcactcgttttagtaccaaatatgaaaattatcacttacgtcttccgatcaaggaaacgaattgaaacatcattgacctcagcttcagcaatttgtaaccttagtatacctcctgaaaggatctcaacacctgaaacctgtaggaataaaacattgaatctcctgctcca

SEQ ID NO: 3975 - DNA, 200 bp, Kochia scoparia
gaacagtggagtctcgatcatctcatagcgtttgtttaatcaaaagtacattacttcgggcctgttcttgtcagcttactaaacttgaacttatttgaatggaatttggttgaatgtattatatcgatcctatatttgagtgcttcatgagaccttattggtcttaaactcaacacttgaactgaacttattggacctaa

SEQ ID NO: 3976 - DNA, 200 bp, Kochia scoparia
ttaggtccaataagttcagttcaagtgttgagtttaagaccaataaggtctcatgaagcactcaaatataggatcgatataatacattcaaccaaattccattcaaataagttcaagtttagtaagctgacaagaacaggcccgaagtaatgtacttttgattaaacaaacgctatgagatgatcgagactccactgttc

SEQ ID NO: 3977 - DNA, 200 bp, Kochia scoparia
cttgaactgaacttattggacctaatttttgaatgtaaagagcacacattcttagtgttaaacattttcattaattttacgactgcattatttaatttggaaatgaagagggtttgtccgtttgtggttcattaatattgatactacgtgtacttattattgttctctttagacgtgagccaactgcggggaagactaag

SEQ ID NO: 3978 - DNA, 200 bp, Kochia scoparia
cttagtcttccccgcagttggctcacgtctaaagagaacaataataagtacacgtagtatcaatattaatgaaccacaaacggacaaaccctcttcatttccaaattaaataatgcagtcgtaaaattaatgaaaatgtttaacactaagaatgtgtgctctttacattcaaaaattaggtccaataagttcagttcaag

SEQ ID NO: 3979 - DNA, 200 bp, Kochia scoparia
tgagccaactgcggggaagactaagccggaaacaatacttcgacaacttacaaccaaaaaaggacaggtaaaatgcaatttgtatgtctgttactgtggtagtagactagtagtaaatgatgttccaccttttctgatgtattgatgtaagattagggtatctactgagagaataattttcctagagctttatatgaagt

SEQ ID NO: 3980 - DNA, 200 bp, Kochia scoparia
acttcatataaagctctaggaaaattattctctcagtagataccctaatcttacatcaatacatcagaaaaggtggaacatcatttactactagtctactaccacagtaacagacatacaaattgcattttacctgtccttttttggttgtaagttgtcgaagtattgtttccggcttagtcttccccgcagttggctca

SEQ ID NO: 3981 - DNA, 200 bp, Kochia scoparia
attttcctagagctttatatgaagtattaattttttattgatttttagtctttttgtctgctgaaaactactgaatttcattacatagttcttagatttatatcaaacaaatgagcaaccagtgatttgtgatattttagtatgaaatcttccacgtttggaagatcagttttcagttacttgttttaaaatccataggt

SEQ ID NO: 3982 - DNA, 200 bp, Kochia scoparia
acctatggattttaaaacaagtaactgaaaactgatcttccaaacgtggaagatttcatactaaaatatcacaaatcactggttgctcatttgtttgatataaatctaagaactatgtaatgaaattcagtagttttcagcagacaaaaagactaaaaatcaataaaaaattaatacttcatataaagctctaggaaaat

SEQ ID NO: 3983 - DNA, 200 bp, Kochia scoparia
gttacttgttttaaaatccataggtttttattctgctatgggtccagtgatttagagcagaaaaaaaaacataactgaaagaataaaaggggaattagttgatagtttgatgaaatagaaggggagttgccttgagatcaacgtgatctatacaatcactcactgctcactttttagaggtggagctctccaatagtata

SEQ ID NO: 3984 - DNA, 200 bp, Kochia scoparia
tatactattggagagctccacctctaaaaagtgagcagtgagtgattgtatagatcacgttgatctcaaggcaactccccttctatttcatcaaactatcaactaattccccttttattctttcagttatgtttttttttctgctctaaatcactggacccatagcagaataaaaacctatggattttaaaacaagtaac

SEQ ID NO: 3985 - DNA, 200 bp, Kochia scoparia
agaggtggagctctccaatagtataagctaagagtaattaatttattgttgcattctctctcctgatcctcctttcatttccttatctgatctatccttagtgttttttattttcattcccgaccattgtggcctttcgtaacgtaaatgattaatggtggtattttgtgttgataattttcatttcattggtttattgg

SEQ ID NO: 3986 - DNA, 200 bp, Kochia scoparia
ccaataaaccaatgaaatgaaaattatcaacacaaaataccaccattaatcatttacgttacgaaaggccacaatggtcgggaatgaaaataaaaaacactaaggatagatcagataaggaaatgaaaggaggatcaggagagagaatgcaacaataaattaattactcttagcttatactattggagagctccacctct

SEQ ID NO: 3987 - DNA, 200 bp, Kochia scoparia
aattttcatttcattggtttattggccgatttatttatgatttggtaatgagaaatcatacaattttgaatttgccagtgtgttgaggtctcacgtatcctatatgcttctgccgcaggtttacagtttaaatcagggaaaaagggatgtagaaactgttttaacaatgggaattatggaagatgttagcattttccccc

SEQ ID NO: 3988 - DNA, 200 bp, Kochia scoparia
gggggaaaatgctaacatcttccataattcccattgttaaaacagtttctacatccctttttccctgatttaaactgtaaacctgcggcagaagcatataggatacgtgagacctcaacacactggcaaattcaaaattgtatgatttctcattaccaaatcataaataaatcggccaataaaccaatgaaatgaaaatt

SEQ ID NO: 3989 - DNA, 200 bp, Kochia scoparia
atggaagatgttagcattttcccccagcctgctggaggtaactgtgtcctgtattcttattagctttatcaactgaaaaaaatgctggttttttttaatttttttttaattttttattggtagatttgtattgtttacgcttttaaggtttaaccatttaataaataaatctgtttgtaagccctttgtgtttaatatcc

SEQ ID NO: 3990 - DNA, 200 bp, Kochia scoparia
ggatattaaacacaaagggcttacaaacagatttatttattaaatggttaaaccttaaaagcgtaaacaatacaaatctaccaataaaaaattaaaaaaaaattaaaaaaaaccagcatttttttcagttgataaagctaataagaatacaggacacagttacctccagcaggctgggggaaaatgctaacatcttccat

SEQ ID NO: 3991 - DNA, 200 bp, Kochia scoparia
tgtaagccctttgtgtttaatatcccttttcgaagcttttgttggccgctgaggcactaaagatgctctttctttctgtgtattcctctttaagaggttacccatgtattggtgagtctgtataggctttggttaaattcatacactatcaaattaggaaaagaaaaagaagttatcgagtttataactaaagagtttgc

SEQ ID NO: 3992 - DNA, 200 bp, Kochia scoparia
gcaaactctttagttataaactcgataacttctttttcttttcctaatttgatagtgtatgaatttaaccaaagcctatacagactcaccaatacatgggtaacctcttaaagaggaatacacagaaagaaagagcatctttagtgcctcagcggccaacaaaagcttcgaaaagggatattaaacacaaagggcttaca

SEQ ID NO: 3993 - DNA, 200 bp, Kochia scoparia
tcgagtttataactaaagagtttgcgaaaggcacactcgtattcacccaaccaaccttgaatttaagtttgaaggagatgcaaaactaagtgatagaggctcatataatcatatagaccactttgccttgttgtaagcccatgttggcgtagtttatgttttccatatcccagtttggatgattccatcaattacagttt

SEQ ID NO: 3994 - DNA, 200 bp, Kochia scoparia
aaactgtaattgatggaatcatccaaactgggatatggaaaacataaactacgccaacatgggcttacaacaaggcaaagtggtctatatgattatatgagcctctatcacttagttttgcatctccttcaaacttaaattcaaggttggttgggtgaatacgagtgtgcctttcgcaaactctttagttataaactcga

SEQ ID NO: 3995 - DNA, 200 bp, Kochia scoparia
tggatgattccatcaattacagttttcgagatgaattgtcattttgcaatttcacacctgcaataaccattgtgtgggcctgtggctatgggcaatggactcacaagtcacattgtactgactttccttctgaaagcatagaggacaattgatttcgcgttctaatattatgctttaacagagtcaacagagatgatgag

SEQ ID NO: 3996 - DNA, 200 bp, Kochia scoparia
ctcatcatctctgttgactctgttaaagcataatattagaacgcgaaatcaattgtcctctatgctttcagaaggaaagtcagtacaatgtgacttgtgagtccattgcccatagccacaggcccacacaatggttattgcaggtgtgaaattgcaaaatgacaattcatctcgaaaactgtaattgatggaatcatcca

SEQ ID NO: 3997 - DNA, 200 bp, Kochia scoparia
taacagagtcaacagagatgatgagattgttttattgtgcaacatctctcctagcctgagattctttatgtcgtcaaatcgctctattggtctttactttattagatcctttaaagtgaaagatacccttttctatattaatttttgtttgaatggagtcaagctacctaggcaatttgatatatgatgttaccgtcaac

SEQ ID NO: 3998 - DNA, 200 bp, Kochia scoparia
gttgacggtaacatcatatatcaaattgcctaggtagcttgactccattcaaacaaaaattaatatagaaaagggtatctttcactttaaaggatctaataaagtaaagaccaatagagcgatttgacgacataaagaatctcaggctaggagagatgttgcacaataaaacaatctcatcatctctgttgactctgtta

SEQ ID NO: 3999 - DNA, 200 bp, Kochia scoparia
tttgatatatgatgttaccgtcaacaaaattgtttggcttctgtagtgtttgtttttttggatggaataggcctctcttatctgtatccacttcattgctaaaaaagattgtttatgttggatgagaagtttgagttttgcatttgttctttgttaataaaaaaatattagctgttgccttaaacctctggacgaataaa

SEQ ID NO: 4000 - DNA, 200 bp, Kochia scoparia
tttattcgtccagaggtttaaggcaacagctaatatttttttattaacaaagaacaaatgcaaaactcaaacttctcatccaacataaacaatcttttttagcaatgaagtggatacagataagagaggcctattccatccaaaaaaacaaacactacagaagccaaacaattttgttgacggtaacatcatatatcaaa

SEQ ID NO: 4001 - DNA, 200 bp, Kochia scoparia
tgccttaaacctctggacgaataaaaaatttagtctaacatatatcttttgcttctaaaattccagacactggtaaggttgatttggtaatgaatgtggttgagcgtgtgagtggaggtttttcggcgggtggtggaatttcaagcgggtaagagaacatgtgactctgctctgtgcaatttcttatatgatggtcaatg

SEQ ID NO: 4002 - DNA, 200 bp, Kochia scoparia
cattgaccatcatataagaaattgcacagagcagagtcacatgttctcttacccgcttgaaattccaccacccgccgaaaaacctccactcacacgctcaaccacattcattaccaaatcaaccttaccagtgtctggaattttagaagcaaaagatatatgttagactaaattttttattcgtccagaggtttaaggca

SEQ ID NO: 4003 - DNA, 200 bp, Kochia scoparia
gcaatttcttatatgatggtcaatgttgctatgcatatgtttattctgatccaacaaatgcatttacaggataacgagtggcccattgtcaggtctgattggaaggtatatatctgctcttcctatttctgtcggataatctattcaacttctcatgtaaatgccatacaagaaaaagcatttcctcttggtcaatttct

SEQ ID NO: 4004 - DNA, 200 bp, Kochia scoparia
agaaattgaccaagaggaaatgctttttcttgtatggcatttacatgagaagttgaatagattatccgacagaaataggaagagcagatatataccttccaatcagacctgacaatgggccactcgttatcctgtaaatgcatttgttggatcagaataaacatatgcatagcaacattgaccatcatataagaaattgc

SEQ ID NO: 4005 - DNA, 200 bp, Kochia scoparia
aagcatttcctcttggtcaatttctatgtgataattgggtttaaggaatttatatactcgcatgcacacacacactgacacacatacatcaaagcaacatcttttttgattaatgatttcttaacatgctgtgaactaatactttctgtttatgttagtttatgtgtgcaaattttataattaataatagcttttgcttt

SEQ ID NO: 4006 - DNA, 200 bp, Kochia scoparia
aaagcaaaagctattattaattataaaatttgcacacataaactaacataaacagaaagtattagttcacagcatgttaagaaatcattaatcaaaaaagatgttgctttgatgtatgtgtgtcagtgtgtgtgtgcatgcgagtatataaattccttaaacccaattatcacatagaaattgaccaagaggaaatgctt

SEQ ID NO: 4007 - DNA, 200 bp, Kochia scoparia
tataattaataatagcttttgctttaatttggttgcagcttcgcatattctcacagaaatctttttggtaaaaatcaaaaagtaaatgtttcacttgagaggggacaaattgactctatatttcggataaattacacaattccatggattgaaggtgatgataagcgtacacaacagtcaatagtgattcaggtgattgg

SEQ ID NO: 4008 - DNA, 200 bp, Kochia scoparia
ccaatcacctgaatcactattgactgttgtgtacgcttatcatcaccttcaatccatggaattgtgtaatttatccgaaatatagagtcaatttgtcccctctcaagtgaaacatttactttttgatttttaccaaaaagatttctgtgagaatatgcgaagctgcaaccaaattaaagcaaaagctattattaattata

SEQ ID NO: 4009 - DNA, 200 bp, Kochia scoparia
agtcaatagtgattcaggtgattggcatcagtcttggctgtctgtatatctttttagaaaaagcgggtattgcttatctttctttgtgattttgattctctaacttaactttattggtcatccagaattcaagaactcctggtactttggtccatggaaaccaacctggaaatactaacataaccattggccgtgtaact

SEQ ID NO: 4010 - DNA, 200 bp, Kochia scoparia
agttacacggccaatggttatgttagtatttccaggttggtttccatggaccaaagtaccaggagttcttgaattctggatgaccaataaagttaagttagagaatcaaaatcacaaagaaagataagcaatacccgctttttctaaaaagatatacagacagccaagactgatgccaatcacctgaatcactattgact

SEQ ID NO: 4011 - DNA, 200 bp, Kochia scoparia
taacataaccattggccgtgtaactgctggcatggaatttagccggcctctaagaccaaagtggagtggaacagctggacttacgtttcaggtatctttgcataatctgttttgtatttctttcttgatttctcattgctaaatttgatcgatcaacttgtgggtgacatacgtgagttatataattaccattaatgtta

SEQ ID NO: 4012 - DNA, 200 bp, Kochia scoparia
taacattaatggtaattatataactcacgtatgtcacccacaagttgatcgatcaaatttagcaatgagaaatcaagaaagaaatacaaaacagattatgcaaagatacctgaaacgtaagtccagctgttccactccactttggtcttagaggccggctaaattccatgccagcagttacacggccaatggttatgtta

SEQ ID NO: 4013 - DNA, 200 bp, Kochia scoparia
agttatataattaccattaatgttattgcagcgtgctggtgctcatgatgagaaaggggatcctataataaaagatttttacagcagccctcttactgcgaggtatatgaaattgctggcagcaacctattagctaaaactttgagactgctgcttctgtaaattttcaagtccatagctatttattcctgcatctagtt

SEQ ID NO: 4014 - DNA, 200 bp, Kochia scoparia
aactagatgcaggaataaatagctatggacttgaaaatttacagaagcagcagtctcaaagttttagctaataggttgctgccagcaatttcatatacctcgcagtaagagggctgctgtaaaaatcttttattataggatcccctttctcatcatgagcaccagcacgctgcaataacattaatggtaattatataact

SEQ ID NO: 4015 - DNA, 200 bp, Kochia scoparia
tagctatttattcctgcatctagtttcttgctttgtttaatcaataccttgttttcagtgggaattctcatgataatatgttgcttgccaaatgtgagtgtggctacactggtgatttaggttcttcaatggttagtcctctgatctctagaaacagatgttcattatactctttttgctcacatatttttatatgctct

SEQ ID NO: 4016 - DNA, 200 bp, Kochia scoparia
agagcatataaaaatatgtgagcaaaaagagtataatgaacatctgtttctagagatcagaggactaaccattgaagaacctaaatcaccagtgtagccacactcacatttggcaagcaacatattatcatgagaattcccactgaaaacaaggtattgattaaacaaagcaagaaactagatgcaggaataaatagcta

SEQ ID NO: 4017 - DNA, 200 bp, Kochia scoparia
ttgctcacatatttttatatgctctttttgctcacataatttcattatgttctttttgctcatatattttcattatgcagttggtcttcagtatggaacaaggtcttcccatactgccagagtggctttgctttaatagagtgaatgcccgtgctaggacagggatggatgttgggccagctaatctccttttaaggttg

SEQ ID NO: 4018 - DNA, 200 bp, Kochia scoparia
caaccttaaaaggagattagctggcccaacatccatccctgtcctagcacgggcattcactctattaaagcaaagccactctggcagtatgggaagaccttgttccatactgaagaccaactgcataatgaaaatatatgagcaaaaagaacataatgaaattatgtgagcaaaaagagcatataaaaatatgtgagcaa

SEQ ID NO: 4019 - DNA, 200 bp, Kochia scoparia
gccagctaatctccttttaaggttggagttggttgtttaaagtttcctattatggttatgtagagcctagttcagagtgtatgtggaaatttagtgtatccttattctcaacttgtttttggtggttcttgacattattacattgttacctttgattcagtttgtctggtgggaatgtggtgggtaaattctctcctcat

SEQ ID NO: 4020 - DNA, 200 bp, Kochia scoparia
atgaggagagaatttacccaccacattcccaccagacaaactgaatcaaaggtaacaatgtaataatgtcaagaaccaccaaaaacaagttgagaataaggatacactaaatttccacatacactctgaactaggctctacataaccataataggaaactttaaacaaccaactccaaccttaaaaggagattagctggc

SEQ ID NO: 4021 - DNA, 200 bp, Kochia scoparia
tgtggtgggtaaattctctcctcatgaagcatttgccattggcggcacaaatagtgtgagaggatatgaagagggtgccgttggctctggttgctcctatgtggttggctgtggggaattatccttccctctggtactcatgatttaaaagctcattgcaattttttctaacttatttcacttctttagttctctttagt

SEQ ID NO: 4022 - DNA, 200 bp, Kochia scoparia
actaaagagaactaaagaagtgaaataagttagaaaaaattgcaatgagcttttaaatcatgagtaccagagggaaggataattccccacagccaaccacataggagcaaccagagccaacggcaccctcttcatatcctctcacactatttgtgccgccaatggcaaatgcttcatgaggagagaatttacccaccaca

SEQ ID NO: 4023 - DNA, 200 bp, Kochia scoparia
tttcacttctttagttctctttagtatatatatatatgctacaatttttctgctgctatatctttgaatataaattgttttgcttttgcttgggatgtggcaatgaggactgacaatattgtctttcagaagggatttgatcttgggaacatttttcattttatattttaatttatcttgaaaaacatacaaatggctca

SEQ ID NO: 4024 - DNA, 200 bp, Kochia scoparia
tgagccatttgtatgtttttcaagataaattaaaatataaaatgaaaaatgttcccaagatcaaatcccttctgaaagacaatattgtcagtcctcattgccacatcccaagcaaaagcaaaacaatttatattcaaagatatagcagcagaaaaattgtagcatatatatatatactaaagagaactaaagaagtgaaa

SEQ ID NO: 4025 - DNA, 200 bp, Kochia scoparia
tcttgaaaaacatacaaatggctcatctaatgtagaacctagcaagctccactgcttatactactgtggctaaggctgtcagttaaagcttcagaatgcttggaaaattattaccgtaaaaataataataaaaaaggttctggaaatgtgtgtatgaagtattaagagaagcaactctaaaaagtctatactgtagtaaa

SEQ ID NO: 4026 - DNA, 200 bp, Kochia scoparia
tttactacagtatagactttttagagttgcttctcttaatacttcatacacacatttccagaaccttttttattattatttttacggtaataattttccaagcattctgaagctttaactgacagccttagccacagtagtataagcagtggagcttgctaggttctacattagatgagccatttgtatgtttttcaaga

SEQ ID NO: 4027 - DNA, 200 bp, Kochia scoparia
tctaaaaagtctatactgtagtaaagtgaatcaatgtaagagaaagtacaagtgtgtgtaataatcaaataacattgtgataatgttaaattgattaagcaaattgatatgttgtgatttgttgtagtagtgtgcaaatatcgtttgatttaagctgattgttggacatatatacttttgttttttgttttttgtttcaa

SEQ ID NO: 4028 - DNA, 200 bp, Kochia scoparia
ttgaaacaaaaaacaaaaaacaaaagtatatatgtccaacaatcagcttaaatcaaacgatatttgcacactactacaacaaatcacaacatatcaatttgcttaatcaatttaacattatcacaatgttatttgattattacacacacttgtactttctcttacattgattcactttactacagtatagactttttaga

SEQ ID NO: 4029 - DNA, 200 bp, Kochia scoparia
ttttgttttttgttttttgtttcaaaaggctctccccattgatttaagcttacaaatttatttattttttccagtttggtccagttgatggtgctctttttgctgattatggaactgacctcggatcaggctcttctgttcctggtatgtgtagcccaccaacccaacccaaaataaaaataaaaatagaattcaaatat

SEQ ID NO: 4030 - DNA, 200 bp, Kochia scoparia
atatttgaattctatttttatttttattttgggttgggttggtgggctacacataccaggaacagaagagcctgatccgaggtcagttccataatcagcaaaaagagcaccatcaactggaccaaactggaaaaaataaataaatttgtaagcttaaatcaatggggagagccttttgaaacaaaaaacaaaaaacaaaa

SEQ ID NO: 4031 - DNA, 200 bp, Kochia scoparia
aaaaataaaaatagaattcaaatataataaaacggacatgcaaaatgagtcgagctttgttattatcattagtagccctagatatttttggcattgttaatcatgctagtaccaaagtttgaacattccagctttctaataaatggattgattggattcacaagaatgaagctcgttattctgtagtttaatttgtaatt

SEQ ID NO: 4032 - DNA, 200 bp, Kochia scoparia
aattacaaattaaactacagaataacgagcttcattcttgtgaatccaatcaatccatttattagaaagctggaatgttcaaactttggtactagcatgattaacaatgccaaaaatatctagggctactaatgataataacaaagctcgactcattttgcatgtccgttttattatatttgaattctatttttattttt

SEQ ID NO: 4033 - DNA, 200 bp, Kochia scoparia
ttattctgtagtttaatttgtaattctttaaaacattgtgttaaaaatggaaattaagagattatgaggatcattatacattgatatatttcagacattgtgtgaactgattcagttgaatgacgaagataatgataatgaattgattacatcaaaattacactgggatagtaacaaatttttttaatttttagttttta

SEQ ID NO: 4034 - DNA, 200 bp, Kochia scoparia
taaaaactaaaaattaaaaaaatttgttactatcccagtgtaattttgatgtaatcaattcattatcattatcttcgtcattcaactgaatcagttcacacaatgtctgaaatatatcaatgtataatgatcctcataatctcttaatttccatttttaacacaatgttttaaagaattacaaattaaactacagaataa

SEQ ID NO: 4035 - DNA, 200 bp, Kochia scoparia
aaatttttttaatttttagtttttaatttttaattttttttgtgctaaaaaaaacaacctgcaaggctgcaacactaaaagtatttaacttatttctttctctattatctccacagcttcactaaaattccagattcttctcaagtgttcaataacaatttttttttcatattctaaactacctatcccataatatcgtt

SEQ ID NO: 4036 - DNA, 200 bp, Kochia scoparia
aacgatattatgggataggtagtttagaatatgaaaaaaaaattgttattgaacacttgagaagaatctggaattttagtgaagctgtggagataatagagaaagaaataagttaaatacttttagtgttgcagccttgcaggttgttttttttagcacaaaaaaaattaaaaattaaaaactaaaaattaaaaaaattt

SEQ ID NO: 4037 - DNA, 200 bp, Kochia scoparia
aaactacctatcccataatatcgtttcttagctgacaattaggtattgtggaagtatgaagtctttgcctcttttttccgcatctgaatagactgtatttttgacacaaatctgtccggttcttaaaaagaaaaaattgtggatttatcacttagttgtgtgcgagttttcattacaaattttttttacagttagagata

SEQ ID NO: 4038 - DNA, 200 bp, Kochia scoparia
tatctctaactgtaaaaaaaatttgtaatgaaaactcgcacacaactaagtgataaatccacaattttttctttttaagaaccggacagatttgtgtcaaaaatacagtctattcagatgcggaaaaaagaggcaaagacttcatacttccacaatacctaattgtcagctaagaaacgatattatgggataggtagttt

SEQ ID NO: 4039 - DNA, 200 bp, Kochia scoparia
caaattttttttacagttagagataaataagattttgtgatctttattatacaagtggaggggggagggagatggtatccctcttcaaaaaactcaaaatacccttaatgaattaaatgcatatttaaaaagttaattttgtttaatttttcacttgccaattaaaagtagtgatcgtattttattgaacaagttaaata

SEQ ID NO: 4040 - DNA, 200 bp, Kochia scoparia
tatttaacttgttcaataaaatacgatcactacttttaattggcaagtgaaaaattaaacaaaattaactttttaaatatgcatttaattcattaagggtattttgagttttttgaagagggataccatctccctcccccctccacttgtataataaagatcacaaaatcttatttatctctaactgtaaaaaaaatttg

SEQ ID NO: 4041 - DNA, 200 bp, Kochia scoparia
cgtattttattgaacaagttaaatatgaaattttattttaaaattttcaatcaaatattaaagtaatgagaatgattttcttttcatatttgacatatgaaacatgctattactgacctgtgtatatgaaactcgatctaataagaaattatatgaaaattatattctaaaacttaaatgttaattttttattattcagt

SEQ ID NO: 4042 - DNA, 200 bp, Kochia scoparia
actgaataataaaaaattaacatttaagttttagaatataattttcatataatttcttattagatcgagtttcatatacacaggtcagtaatagcatgtttcatatgtcaaatatgaaaagaaaatcattctcattactttaatatttgattgaaaattttaaaataaaatttcatatttaacttgttcaataaaatacg

SEQ ID NO: 4043 - DNA, 200 bp, Kochia scoparia
aaatgttaattttttattattcagtattctctatcatatagataaaactttttcactttattttagtcaacgattgaacctaatacacaaattccttttcactttatatgaacacatgatttttgttactttaaagaaaacaaataaacattgttttaagaaaactagcaaaaaaatacaaataaatgaatatgtatgtt

SEQ ID NO: 4044 - DNA, 200 bp, Kochia scoparia
aacatacatattcatttatttgtatttttttgctagttttcttaaaacaatgtttatttgttttctttaaagtaacaaaaatcatgtgttcatataaagtgaaaaggaatttgtgtattaggttcaatcgttgactaaaataaagtgaaaaagttttatctatatgatagagaatactgaataataaaaaattaacattt

SEQ ID NO: 4045 - DNA, 200 bp, Kochia scoparia
atacaaataaatgaatatgtatgttcaattgttcaaaccaaattttctacagctaacttattttaagaaataacattaatatgatacatgcacacccttaattgaatgtgacctttcatgtatcaatgaaataacaaataattcatatgatatggacatatagttagattgttaatgcagagcttatgtgagagatgggt

SEQ ID NO: 4046 - DNA, 200 bp, Kochia scoparia
acccatctctcacataagctctgcattaacaatctaactatatgtccatatcatatgaattatttgttatttcattgatacatgaaaggtcacattcaattaagggtgtgcatgtatcatattaatgttatttcttaaaataagttagctgtagaaaatttggtttgaacaattgaacatacatattcatttatttgtat

SEQ ID NO: 4047 - DNA, 200 bp, Kochia scoparia
tgcagagcttatgtgagagatgggtatgattattaaatatttttcttttaaattatttcataggcgatccagctggtgcaagattaaaacccggtagtggatacgggtatggatttggtatccgcgtggagtcacctttaggtccattgcggcttgaatatgcatttaatgacaagcaagcaaggaggtttcattttggt

SEQ ID NO: 4048 - DNA, 200 bp, Kochia scoparia
accaaaatgaaacctccttgcttgcttgtcattaaatgcatattcaagccgcaatggacctaaaggtgactccacgcggataccaaatccatacccgtatccactaccgggttttaatcttgcaccagctggatcgcctatgaaataatttaaaagaaaaatatttaataatcatacccatctctcacataagctctgca

SEQ ID NO: 4049 - DNA, 200 bp, Kochia scoparia
gcaagcaaggaggtttcattttggtgttggtcatcggaactaacagagcttcaattgtttgggtagctgcttgcatcatctatctgcgattttgttagagtaggaaaggaaaaatgctgcttgtatttttgcagtaattggtctggaatcgatgagaatggagggctacacaaacttgaaaatatttattctttgtttca

SEQ ID NO: 4050 - DNA, 200 bp, Kochia scoparia
tgaaacaaagaataaatattttcaagtttgtgtagccctccattctcatcgattccagaccaattactgcaaaaatacaagcagcatttttcctttcctactctaacaaaatcgcagatagatgatgcaagcagctacccaaacaattgaagctctgttagttccgatgaccaacaccaaaatgaaacctccttgcttgc

SEQ ID NO: 4051 - DNA, 200 bp, Kochia scoparia
ttgaaaatatttattctttgtttcacaggctcaagtacatcgtctcatctgttttttctcagctgtgaatgtataataagtttaacctgcgaaaattgccattaaatcacttgctcaattattaaccttgattctgctacatgactttcggcgaatcttgccatctacaaactgtacgttgaatctttaatagaaataat

SEQ ID NO: 4052 - DNA, 200 bp, Kochia scoparia
attatttctattaaagattcaacgtacagtttgtagatggcaagattcgccgaaagtcatgtagcagaatcaaggttaataattgagcaagtgatttaatggcaattttcgcaggttaaacttattatacattcacagctgagaaaaaacagatgagacgatgtacttgagcctgtgaaacaaagaataaatattttcaa

SEQ ID NO: 4053 - DNA, 200 bp, Kochia scoparia
ttttttttttgacgcggaaggatcattttattcaaatataagccttcttagtatctacatcatcaatagaaaagaactcaaaaagacttaaaaaacagaaacggaactataaccacaacacctaaactttaatctaatcaagctcaactccacgaaagtgcatacaatcatgtaaacatgataaaatatcgacgtcaaag

SEQ ID NO: 4054 - DNA, 200 bp, Kochia scoparia
ctttgacgtcgatattttatcatgtttacatgattgtatgcactttcgtggagttgagcttgattagattaaagtttaggtgttgtggttatagttccgtttctgttttttaagtctttttgagttcttttctattgatgatgtagatactaagaaggcttatatttgaataaaatgatccttccgcgtcaaaaaaaaaa

SEQ ID NO: 4055 - DNA, 200 bp, Kochia scoparia
acatgataaaatatcgacgtcaaagcatatttcaatagaatctacaccaccggtgctgtagatgttattgcaaaagcaatcgccccgtagatcaaaccctttaatttcattcattagtatccttatttggtcatactcttgcattttatttagatgatattcaaaaggagcaatgcattgggaaattctcccaccttaac

SEQ ID NO: 4056 - DNA, 200 bp, Kochia scoparia
gttaaggtgggagaatttcccaatgcattgctccttttgaatatcatctaaataaaatgcaagagtatgaccaaataaggatactaatgaatgaaattaaagggtttgatctacggggcgattgcttttgcaataacatctacagcaccggtggtgtagattctattgaaatatgctttgacgtcgatattttatcatgt

SEQ ID NO: 4057 - DNA, 200 bp, Kochia scoparia
cattgggaaattctcccaccttaacaatgagggataaaaaaagcacctattaggtgacttttgaaggctcatgcactatagaatttgcgtctttgtttcatttattctttggtgtataagtgaagtttattgcttacttgatggaaggttatctcatgtctataataatttttgagaattctaggttaaggtatgagaga

SEQ ID NO: 4058 - DNA, 200 bp, Kochia scoparia
tctctcataccttaacctagaattctcaaaaattattatagacatgagataaccttccatcaagtaagcaataaacttcacttatacaccaaagaataaatgaaacaaagacgcaaattctatagtgcatgagccttcaaaagtcacctaataggtgctttttttatccctcattgttaaggtgggagaatttcccaatg

SEQ ID NO: 4059 - DNA, 200 bp, Kochia scoparia
gaattctaggttaaggtatgagagaggagtaaacttcaatttcctgactctttgtagtttgtagaagtcaattcccgatgtatcccttctgttgttttgctcctcagtctagaaccctgtgtcacctcctttctgaattggggttttaaagagagttactgtatatagtttgtcaagttacattgccccaaatccttgaa

SEQ ID NO: 4060 - DNA, 200 bp, Kochia scoparia
ttcaaggatttggggcaatgtaacttgacaaactatatacagtaactctctttaaaaccccaattcagaaaggaggtgacacagggttctagactgaggagcaaaacaacagaagggatacatcgggaattgacttctacaaactacaaagagtcaggaaattgaagtttactcctctctcataccttaacctagaattc

SEQ ID NO: 4061 - DNA, 200 bp, Kochia scoparia
agttacattgccccaaatccttgaacggaagtcagttttcctaaagaatgtggttctctcattgagtcttgccatgtttttcctatgtatttaaatctctgtttgggtaaaaatgaaatggctatgcaagatgttgaggtttatatatttttatatttcatatccagggtgatgcgccacacgatttcagtttttgtcgg

SEQ ID NO: 4062 - DNA, 200 bp, Kochia scoparia
ccgacaaaaactgaaatcgtgtggcgcatcaccctggatatgaaatataaaaatatataaacctcaacatcttgcatagccatttcatttttacccaaacagagatttaaatacataggaaaaacatggcaagactcaatgagagaaccacattctttaggaaaactgacttccgttcaaggatttggggcaatgtaact

SEQ ID NO: 4063 - DNA, 200 bp, Kochia scoparia
gccacacgatttcagtttttgtcggtgatgaaagtgggataatcaataggattgctggtgttatttctagaagagggtacaacatagagtctctcgctgtcggattaaacagggataaagctcttttcactatagtagtgtgtggtactgaaaaggtgttgcgccaagttatggaacaacttaacaagcttgttaatgtt

SEQ ID NO: 4064 - DNA, 200 bp, Kochia scoparia
aacattaacaagcttgttaagttgttccataacttggcgcaacaccttttcagtaccacacactactatagtgaaaagagctttatccctgtttaatccgacagcgagagactctatgttgtaccctcttctagaaataacaccagcaatcctattgattatcccactttcatcaccgacaaaaactgaaatcgtgtggc

SEQ ID NO: 4065 - DNA, 200 bp, Kochia scoparia
acaacttaacaagcttgttaatgttttgaaggtaatgatctaatttaaacttgtatttaagtcatctctgatgccctgacaacgctgacgttggtgtcataaagatctttagattgtacacggcttacaactttcaccatttggcgcgtagtaaagaaacctgaattgcccatcagatcttctgatcaattgaattttga

SEQ ID NO: 4066 - DNA, 200 bp, Kochia scoparia
tcaaaattcaattgatcagaagatctgatgggcaattcaggtttctttactacgcgccaaatggtgaaagttgtaagccgtgtacaatctaaagatctttatgacaccaacgtcagcgttgtcagggcatcagagatgacttaaatacaagtttaaattagatcattaccttcaaaacattaacaagcttgttaagttgt

SEQ ID NO: 4067 - DNA, 200 bp, Kochia scoparia
gatcttctgatcaattgaattttgaaaatagatatataatggtgtattataattgtggttatcctatccatgtatgtttgtacatggtagtgatggtacattgtcttcacagtaatgctggagagcgtagggcttgtgttgctacctattgtttaattactcccgtccgtgtaggttgaagatctttcaagagagccaca

SEQ ID NO: 4068 - DNA, 200 bp, Kochia scoparia
tgtggctctcttgaaagatcttcaacctacacggacgggagtaattaaacaataggtagcaacacaagccctacgctctccagcattactgtgaagacaatgtaccatcactaccatgtacaaacatacatggataggataaccacaattataatacaccattatatatctattttcaaaattcaattgatcagaagatc

SEQ ID NO: 4069 - DNA, 200 bp, Kochia scoparia
ttgaagatctttcaagagagccacaagtggaacgtgaattgatgcttgtaaaactgaaagcagatgcaaattaccgtgctgaggtatttcaacagttttggttaattctcataatggcataattatcactttaaatgttttttcgtattcaattgtcagctggtaatgaagaagaaattgcggttaatcataagaaaaat

SEQ ID NO: 4070 - DNA, 200 bp, Kochia scoparia
atttttcttatgattaaccgcaatttcttcttcattaccagctgacaattgaatacgaaaaaacatttaaagtgataattatgccattatgagaattaaccaaaactgttgaaatacctcagcacggtaatttgcatctgctttcagttttacaagcatcaattcacgttccacttgtggctctcttgaaagatcttcaa

SEQ ID NO: 4071 - DNA, 200 bp, Kochia scoparia
aattgcggttaatcataagaaaaatgttcacagaaagctcaagttcttcggaaactttattgcataaaagtattgtttagaatatgtcttaattccaattattgcgtaagaagtctcaaaaatcaccaattacctcacaaaactcaccctttcaataattaactacctataatagtcactcctgttttactgtactcccc

SEQ ID NO: 4072 - DNA, 200 bp, Kochia scoparia
ggggagtacagtaaaacaggagtgactattataggtagttaattattgaaagggtgagttttgtgaggtaattggtgatttttgagacttcttacgcaataattggaattaagacatattctaaacaatacttttatgcaataaagtttccgaagaacttgagctttctgtgaacatttttcttatgattaaccgcaatt

SEQ ID NO: 4073 - DNA, 200 bp, Kochia scoparia
tcactcctgttttactgtactccccttatgcagttatatccatcttttagtatgtccgtctctctccatctccatgaattatatgatccgggatttagttgcacgttatcttcagttattatttgtaatttgctattatgcaatcacaaatgaaggtttcagaatctttttcacttgaacatgaagtcaacttgtgaatt

SEQ ID NO: 4074 - DNA, 200 bp, Kochia scoparia
aattcacaagttgacttcatgttcaagtgaaaaagattctgaaaccttcatttgtgattgcataatagcaaattacaaataataactgaagataacgtgcaactaaatcccggatcatataattcatggagatggagagagacggacatactaaaagatggatataactgcataaggggagtacagtaaaacaggagtga

SEQ ID NO: 4075 - DNA, 200 bp, Kochia scoparia
tgaacatgaagtcaacttgtgaattgtttttaagtatctgttattactaaggaaagtcacgggcattagtaaactcacattcctctattgtgcaaattttcatgaaacatagccatcaatattcggtattggagtggtttcccatattgtatacacaaattttcacatgattgtgtgacactcaattattaactctctat

SEQ ID NO: 4076 - DNA, 200 bp, Kochia scoparia
atagagagttaataattgagtgtcacacaatcatgtgaaaatttgtgtatacaatatgggaaaccactccaataccgaatattgatggctatgtttcatgaaaatttgcacaatagaggaatgtgagtttactaatgcccgtgactttccttagtaataacagatacttaaaaacaattcacaagttgacttcatgttca

SEQ ID NO: 4077 - DNA, 200 bp, Kochia scoparia
tgacactcaattattaactctctatttgcatggctttttaaaaatatatatggatgggcggagaggaatctatgttagtagttatctgctctgtgcattggtcagttaaggatgctgaattacccaaatgttctatttttttggatctgcagataatgtggttagtggacattttcagggcaaagattgtggatgtgtca

SEQ ID NO: 4078 - DNA, 200 bp, Kochia scoparia
tgacacatccacaatctttgccctgaaaatgtccactaaccacattatctgcagatccaaaaaaatagaacatttgggtaattcagcatccttaactgaccaatgcacagagcagataactactaacatagattcctctccgcccatccatatatatttttaaaaagccatgcaaatagagagttaataattgagtgtca

SEQ ID NO: 4079 - DNA, 200 bp, Kochia scoparia
cagggcaaagattgtggatgtgtcagaaaatttagtcacagttgaggtgagtgattgatgaatggttattttgtgtcctaaactgatgcaatttactgtgctaatgttgtcttcatgtaaatcatatccaattatatatagctcgatgtgtaagctctagattttcatattgcagcctactctataaattgcacctttta

SEQ ID NO: 4080 - DNA, 200 bp, Kochia scoparia
taaaaggtgcaatttatagagtaggctgcaatatgaaaatctagagcttacacatcgagctatatataattggatatgatttacatgaagacaacattagcacagtaaattgcatcagtttaggacacaaaataaccattcatcaatcactcacctcaactgtgactaaattttctgacacatccacaatctttgccctg

SEQ ID NO: 4081 - DNA, 200 bp, Kochia scoparia
cctactctataaattgcaccttttataataatgtggttagtaagactaaattctcctttttattgtagacttaatagttttacaggccttttatctggtgctgtgcaggtgactggggatcctggaaagttggaagctgtcctgagaaactttcacaagtttggaattaaagaaattgcaaggacaggaaaggttagtct

SEQ ID NO: 4082 - DNA, 200 bp, Kochia scoparia
agactaacctttcctgtccttgcaatttctttaattccaaacttgtgaaagtttctcaggacagcttccaactttccaggatccccagtcacctgcacagcaccagataaaaggcctgtaaaactattaagtctacaataaaaaggagaatttagtcttactaaccacattattataaaaggtgcaatttatagagtagg

SEQ ID NO: 4083 - DNA, 200 bp, Kochia scoparia
ttgcaaggacaggaaaggttagtctttttgtcacttgaatagaagaatcagatagatggaaagtatacaagtcatagtactgagaaggaaaagtatagttggagtaaatagctttatagtctactgttgattttgtaaacgaattttttcaatgctaattctcagtgagaccaatgaagataaaggtttttgatgttttg

SEQ ID NO: 4084 - DNA, 200 bp, Kochia scoparia
caaaacatcaaaaacctttatcttcattggtctcactgagaattagcattgaaaaaattcgtttacaaaatcaacagtagactataaagctatttactccaactatacttttccttctcagtactatgacttgtatactttccatctatctgattcttctattcaagtgacaaaaagactaacctttcctgtccttgcaa

SEQ ID NO: 4085 - DNA, 200 bp, Kochia scoparia
gaagataaaggtttttgatgttttgaatgtgtgacagattgctttaagacgggagaggataggtgagacagctccattctggagattctctgctgcttcttatccagatctagaagagaaggcctctattgctgttgttaagtctgcagaaagaagtatgaatggtaatgctggctcatcgttgagtgtaagtaaagttt

SEQ ID NO: 4086 - DNA, 200 bp, Kochia scoparia
aaactttacttacactcaacgatgagccagcattaccattcatacttctttctgcagacttaacaacagcaatagaggccttctcttctagatctggataagaagcagcagagaatctccagaatggagctgtctcacctatcctctcccgtcttaaagcaatctgtcacacattcaaaacatcaaaaacctttatcttc

SEQ ID NO: 4087 - DNA, 200 bp, Kochia scoparia
tcatcgttgagtgtaagtaaagtttctcctaccgaaaaatcatctcattccattctccccatttgtctcttctatgagcgtcttttctttgtcgctttaacttttaaagaacatatggacttttatatgcttatgatttgcaatcctgcttgattttatttcatattttctatctataacttgtgattgcttgtcatgaa

SEQ ID NO: 4088 - DNA, 200 bp, Kochia scoparia
ttcatgacaagcaatcacaagttatagatagaaaatatgaaataaaatcaagcaggattgcaaatcataagcatataaaagtccatatgttctttaaaagttaaagcgacaaagaaaagacgctcatagaagagacaaatggggagaatggaatgagatgatttttcggtaggagaaactttacttacactcaacgatga

SEQ ID NO: 4089 - DNA, 200 bp, Kochia scoparia
ataacttgtgattgcttgtcatgaattcaatcataagctttgtgtttgacaatttgtatctaaaatgtttcttttgttctctacagggtgatgtttatccggtggagccttatgatctttctccagcacatcaagtacttgatgctcactggggtgtcctttatgatgatgatgtaagctttatttgttgcttcccgaat

SEQ ID NO: 4090 - DNA, 200 bp, Kochia scoparia
attcgggaagcaacaaataaagcttacatcatcatcataaaggacaccccagtgagcatcaagtacttgatgtgctggagaaagatcataaggctccaccggataaacatcaccctgtagagaacaaaagaaacattttagatacaaattgtcaaacacaaagcttatgattgaattcatgacaagcaatcacaagttat

SEQ ID NO: 4091 - DNA, 200 bp, Kochia scoparia
aagctttatttgttgcttcccgaatttttcttgtatcgttgtcgtggaatttgcataaattgtgaaattcaagcttatactcagttgttttcatctgaagggtcaagttaaatgcctttggcatggtttttccccctttctagagttgggtcgttttgcaatttgattttatgatgaatttactctgctagattttttta

SEQ ID NO: 4092 - DNA, 200 bp, Kochia scoparia
taaaaaaatctagcagagtaaattcatcataaaatcaaattgcaaaacgacccaactctagaaagggggaaaaaccatgccaaaggcatttaacttgacccttcagatgaaaacaactgagtataagcttgaatttcacaatttatgcaaattccacgacaacgatacaagaaaaattcgggaagcaacaaataaagctt

SEQ ID NO: 4093 - DNA, 200 bp, Kochia scoparia
gaatttactctgctagatttttttatgtgggagtgctttcctttttcaattttcagtcaagcgggcttcgatcacatactttgaccatggtagttaataatgttcctggagttctcaacactgtaaccatggtgattgctcgtaggggttataacattcaggtcagtatgactctcactgtatgtattaaaaatatgtat

SEQ ID NO: 4094 - DNA, 200 bp, Kochia scoparia
atacatatttttaatacatacagtgagagtcatactgacctgaatgttataacccctacgagcaatcaccatggttacagtgttgagaactccaggaacattattaactaccatggtcaaagtatgtgatcgaagcccgcttgactgaaaattgaaaaaggaaagcactcccacataaaaaaatctagcagagtaaattc

SEQ ID NO: 4095 - DNA, 200 bp, Kochia scoparia
cactgtatgtattaaaaatatgtataatgcattttttttgtgatgtggtctcatatttccttttcttccccatcctcagagtcttgctgttggccctgctgagaaggagggtctttctcgtatcaccactgtcgttcccggaaatgatgaatcaattggaaaattggttcagcaactgaacaaattggtagatctatatg

SEQ ID NO: 4096 - DNA, 200 bp, Kochia scoparia
catatagatctaccaatttgttcagttgctgaaccaattttccaattgattcatcatttccgggaacgacagtggtgatacgagaaagaccctccttctcagcagggccaacagcaagactctgaggatggggaagaaaaggaaatatgagaccacatcacaaaaaaaatgcattatacatatttttaatacatacagtg

SEQ ID NO: 4097 - DNA, 200 bp, Kochia scoparia
ctgaacaaattggtagatctatatgaggtgagattatatgtgtagtgggcatgttgcccaagtaaggtagttttaatccatgcttatatatttttaggaaaaattaacaaaaataatccgacctttcagtggtcttccaaaaataaccggacctttgaataatcccaaaataatcccacctttgctccccatcttccaaa

SEQ ID NO: 4098 - DNA, 200 bp, Kochia scoparia
tttggaagatggggagcaaaggtgggattattttgggattattcaaaggtccggttatttttggaagaccactgaaaggtcggattatttttgttaatttttcctaaaaatatataagcatggattaaaactaccttacttgggcaacatgcccactacacatataatctcacctcatatagatctaccaatttgttcag

SEQ ID NO: 4099 - DNA, 200 bp, Kochia scoparia
ccacctttgctccccatcttccaaaaatggtcccttaccggtttgtgacctgttgactaggttaatttgcaacgtgttgcttctacattggctgtaattaaatttaatctaaattaatcaacatttaatcataattaaatataaaactaattataattaattaaattataattataataccatccctcaccacctcctgc

SEQ ID NO: 4100 - DNA, 200 bp, Kochia scoparia
gcaggaggtggtgagggatggtattataattataatttaattaattataattagttttatatttaattatgattaaatgttgattaatttagattaaatttaattacagccaatgtagaagcaacacgttgcaaattaacctagtcaacaggtcacaaaccggtaagggaccatttttggaagatggggagcaaaggtgg

SEQ ID NO: 4101 - DNA, 200 bp, Kochia scoparia
aataccatccctcaccacctcctgccaccacgcaccacctgccaccaccacacatcacttgccaccatgacccaccaaccaccacctcaaccatgcaccatctctctcctctctcctccctcaccaccacaccaaccaccatcgccacacactgaaactacctactcaaacccaggccacaacaaccatcacaatcacta

SEQ ID NO: 4102 - DNA, 200 bp, Kochia scoparia
tagtgattgtgatggttgttgtggcctgggtttgagtaggtagtttcagtgtgtggcgatggtggttggtgtggtggtgagggaggagagaggagagagatggtgcatggttgaggtggtggttggtgggtcatggtggcaagtgatgtgtggtggtggcaggtggtgcgtggtggcaggaggtggtgagggatggtatt

SEQ ID NO: 4103 - DNA, 200 bp, Kochia scoparia
gccacaacaaccatcacaatcactattctcccaaaatatggcgcaaggaatcaatacttaacgccgccttaactggcgcactctcgttcagaatgctcttttcttctccaatctcaattgttgctcaatctcctcctaatcagtcatcttcttttgtcgaagactgttgcaacaatgagtttccattggtggacgaaaca

SEQ ID NO: 4104 - DNA, 200 bp, Kochia scoparia
tgtttcgtccaccaatggaaactcattgttgcaacagtcttcgacaaaagaagatgactgattaggaggagattgagcaacaattgagattggagaagaaaagagcattctgaacgagagtgcgccagttaaggcggcgttaagtattgattccttgcgccatattttgggagaatagtgattgtgatggttgttgtggc

SEQ ID NO: 4105 - DNA, 200 bp, Kochia scoparia
tgagtttccattggtggacgaaacatcatcatcatcgagtaatttgagaactaatgagggaattgcaaaggaagcatgggagaggggggcttaatttttccatatttttattgtaacaattttgaccctactatttcatggaagaatctcaatttcttatggaaacccagtctcattggtgcaatgcagtagttcaattt

SEQ ID NO: 4106 - DNA, 200 bp, Kochia scoparia
aaattgaactactgcattgcaccaatgagactgggtttccataagaaattgagattcttccatgaaatagtagggtcaaaattgttacaataaaaatatggaaaaattaagcccccctctcccatgcttcctttgcaattccctcattagttctcaaattactcgatgatgatgatgtttcgtccaccaatggaaactca

SEQ ID NO: 4107 - DNA, 200 bp, Kochia scoparia
ttggtgcaatgcagtagttcaatttattttagctttgcttttgtgtgaagtagtgattaggaaaatcattggtgttgtcatttgtcagagtttatcggtcgatcctcctccttgcaataccttaattctcagttgaattacctgtttttggtaacattgtttggcatagatacttaatatttttcgtatgaccttccatc

SEQ ID NO: 4108 - DNA, 200 bp, Kochia scoparia
gatggaaggtcatacgaaaaatattaagtatctatgccaaacaatgttaccaaaaacaggtaattcaactgagaattaaggtattgcaaggaggaggatcgaccgataaactctgacaaatgacaacaccaatgattttcctaatcactacttcacacaaaagcaaagctaaaataaattgaactactgcattgcaccaa

SEQ ID NO: 4109 - DNA, 200 bp, Kochia scoparia
aatatttttcgtatgaccttccatcctttgccttggcccattgttccaaggtccgggttgatggctcaacatcatggtcagcaggcctcatcaaatattttcaaacattttatactccatagttatttattgatcatgatagcctgtggtctgcaccttctgccttgttctggtctccaagaaccagtctaggcgcagca

SEQ ID NO: 4110 - DNA, 200 bp, Kochia scoparia
tgctgcgcctagactggttcttggagaccagaacaaggcagaaggtgcagaccacaggctatcatgatcaataaataactatggagtataaaatgtttgaaaatatttgatgaggcctgctgaccatgatgttgagccatcaacccggaccttggaacaatgggccaaggcaaaggatggaaggtcatacgaaaaatatt

SEQ ID NO: 4111 - DNA, 200 bp, Kochia scoparia
tccaagaaccagtctaggcgcagcacatggaccattcaggaaggtgctgtgctaggttgggacatgaaaatgctggcccgcttgctagcatggccaactgcctgctttaattcctactcttcatcaaaattgtgacatgcatattgtttctagaaccaaactgtggtgctacgtctaaagatctgtcaatctaactataa

SEQ ID NO: 4112 - DNA, 200 bp, Kochia scoparia
ttatagttagattgacagatctttagacgtagcaccacagtttggttctagaaacaatatgcatgtcacaattttgatgaagagtaggaattaaagcaggcagttggccatgctagcaagcgggccagcattttcatgtcccaacctagcacagcaccttcctgaatggtccatgtgctgcgcctagactggttcttgga

SEQ ID NO: 4113 - DNA, 200 bp, Kochia scoparia
taaagatctgtcaatctaactataaaaatgctgtgcctgcagattcaggaccttacacacctgccatttgcagagcgagagcttatgttgatcaaagtagctgtaaacacttctgccaggagagatgtccttgatattgccaatatattccgtgcaaaagcagtagatgtttctgatcacaccataaccttacaggtatg

SEQ ID NO: 4114 - DNA, 200 bp, Kochia scoparia
catacctgtaaggttatggtgtgatcagaaacatctactgcttttgcacggaatatattggcaatatcaaggacatctctcctggcagaagtgtttacagctactttgatcaacataagctctcgctctgcaaatggcaggtgtgtaaggtcctgaatctgcaggcacagcatttttatagttagattgacagatcttta

SEQ ID NO: 4115 - DNA, 200 bp, Lolium multiflorum
aacagtattataaggactagggtgttccgtgtcttatgctggattaaatttcttgatgctgatctggcaaatgctgcaggtcactggagatcctggaaagattgttgcggcacaaaggagcctaagcaaatttgggatcgaagaaatttgtagaacgggaaaagtatttttctggaccatttgctacgtacatgcatggg

SEQ ID NO: 4116 - DNA, 200 bp, Lolium multiflorum
cccatgcatgtacgtagcaaatggtccagaaaaatacttttcccgttctacaaatttcttcgatcccaaatttgcttaggctcctttgtgccgcaacaatctttccaggatctccagtgacctgcagcatttgccagatcagcatcaagaaatttaatccagcataagacacggaacaccctagtccttataatactgtt

SEQ ID NO: 4117 - DNA, 200 bp, Lolium multiflorum
accatttgctacgtacatgcatgggcacatttcttcattgtctaattcttctatctcaatgttcttagattgctttgattcgtgaaaaaattggaacagctgcccgtttctggggattttctactgcttcttacccagacctcatagaagcatcgcccagaaaccctcttcttacttctccgaaaaagacggttaatggc

SEQ ID NO: 4118 - DNA, 200 bp, Lolium multiflorum
gccattaaccgtctttttcggagaagtaagaagagggtttctgggcgatgcttctatgaggtctgggtaagaagcagtagaaaatccccagaaacgggcagctgttccaattttttcacgaatcaaagcaatctaagaacattgagatagaagaattagacaatgaagaaatgtgcccatgcatgtacgtagcaaatggt

SEQ ID NO: 4119 - DNA, 200 bp, Lolium multiflorum
ttctccgaaaaagacggttaatggcagttttgatcagccatccagtgctggggtatgtttccatgaatataagaccaactacatatttattgcatattccttcttgttctgcttcaactgttctaaaagcgaggcaacacttaggctataggtgccacagtctgcctagtaccttttaaaacgctgttactccctccgat

SEQ ID NO: 4120 - DNA, 200 bp, Lolium multiflorum
atcggagggagtaacagcgttttaaaaggtactaggcagactgtggcacctatagcctaagtgttgcctcgcttttagaacagttgaagcagaacaagaaggaatatgcaataaatatgtagttggtcttatattcatggaaacataccccagcactggatggctgatcaaaactgccattaaccgtctttttcggagaa

SEQ ID NO: 4121 - DNA, 200 bp, Lolium multiflorum
ttaaaacgctgttactccctccgatccaaaatacttgtccaaaaatgggagaatctacacactaaaacacgtctagatacatgcatttttgggcaagtattttggaccggatagagtatttgtagttttaaatacttggtaatctacaccacgctgaaaagatgccccttttacatgaatgacacaatcaataatttgat

SEQ ID NO: 4122 - DNA, 200 bp, Lolium multiflorum
atcaaattattgattgtgtcattcatgtaaaaggggcatcttttcagcgtggtgtagattaccaagtatttaaaactacaaatactctatccggtccaaaatacttgcccaaaaatgcatgtatctagacgtgttttagtgtgtagattctcccatttttggacaagtattttggatcggagggagtaacagcgttttaa

SEQ ID NO: 4123 - DNA, 200 bp, Lolium multiflorum
tgaatgacacaatcaataatttgatgtgcaataacagagaagatctcacgaactctgcatatctttaatagctatagtgtaaacaaaggcaactgaacttctctgtcaccagtaaacatcccagtgcagccgtagcactgtaagtgaatttatagatgaaggtaatttgtatacctggccttaggaaagcaaaaaaaaaa

SEQ ID NO: 4124 - DNA, 200 bp, Lolium multiflorum
ttttttttttgctttcctaaggccaggtatacaaattaccttcatctataaattcacttacagtgctacggctgcactgggatgtttactggtgacagagaagttcagttgcctttgtttacactatagctattaaagatatgcagagttcgtgagatcttctctgttattgcacatcaaattattgattgtgtcattca

SEQ ID NO: 4125 - DNA, 200 bp, Lolium multiflorum
tggccttaggaaagcaaaaaaaaaattgctcatacatcgaggggagatacctgcgtgctgacaaaactaaaaaccacacagagatactcatccccacgcaggcagggatataaaacaaataaccagattaagtcgaacattcctatcgtttccactacatcagacacaaacgcccctcaaaggaggccaacataaatatt

SEQ ID NO: 4126 - DNA, 200 bp, Lolium multiflorum
aatatttatgttggcctcctttgaggggcgtttgtgtctgatgtagtggaaacgataggaatgttcgacttaatctggttatttgttttatatccctgcctgcgtggggatgagtatctctgtgtggtttttagttttgtcagcacgcaggtatctcccctcgatgtatgagcaattttttttttgctttcctaaggcca

SEQ ID NO: 4127 - DNA, 200 bp, Lolium multiflorum
aatggtcgcattacaaaggatgcttgagccgtacggcatatgtgaggtttgtactgaacgttcactttgcaaatgcgccatagtaatgatagttcatgattttagagtacttattccaatgtaaattgtggtttagctactgcaattactgattatatgtagtcgatcctttaacctccttggccatacgtattctgcag

SEQ ID NO: 4128 - DNA, 200 bp, Lolium multiflorum
ctgcagaatacgtatggccaaggaggttaaaggatcgactacatataatcagtaattgcagtagctaaaccacaatttacattggaataagtactctaaaatcatgaactatcattactatggcgcatttgcaaagtgaacgttcagtacaaacctcacatatgccgtacggctcaagcatcctttgtaatgcgaccatt

SEQ ID NO: 4129 - DNA, 200 bp, Lolium multiflorum
ctccttggccatacgtattctgcagattgcacgaactggcagggttgcgctgagccgtgagtcaggagttgattctaagtacctccgtgggtattcgcttcctctatagcgtgtcagttggcgagacatcacgctctatcactttgcagattgccattcttccgatctcggatctcgtaaactctgaatatggaatggtg

SEQ ID NO: 4130 - DNA, 200 bp, Lolium multiflorum
caccattccatattcagagtttacgagatccgagatcggaagaatggcaatctgcaaagtgatagagcgtgatgtctcgccaactgacacgctatagaggaagcgaatacccacggaggtacttagaatcaactcctgactcacggctcagcgcaaccctgccagttcgtgcaatctgcagaatacgtatggccaaggag

SEQ ID NO: 4131 - DNA, 200 bp, Lolium multiflorum
cgtaaactctgaatatggaatggtgtttcatttctttgggagcatacatcaagaacacattggtcatagttaggatttttttttgttcttttagataccagagagaaatggagttgggatgtttgaatcctatgtgaatacagggtgggagaagaaactcatccatagtttgcttctagcgtcgctgaggttttatgatt

SEQ ID NO: 4132 - DNA, 200 bp, Lolium multiflorum
aatcataaaacctcagcgacgctagaagcaaactatggatgagtttcttctcccaccctgtattcacataggattcaaacatcccaactccatttctctctggtatctaaaagaacaaaaaaaaatcctaactatgaccaatgtgttcttgatgtatgctcccaaagaaatgaaacaccattccatattcagagtttacg

SEQ ID NO: 4133 - DNA, 200 bp, Lolium multiflorum
ctagcgtcgctgaggttttatgattccctcttcggggtgctaagcagaattaattttctccgacagcccatcacgtggctgctatatgtaccgcgcggagaggtgtatacatccaaaaccgtgtgcttccccaccgcttactccttctctccgccgcattctctaacgtgattttgacgccttcgatcgtgcttgtgacc

SEQ ID NO: 4134 - DNA, 200 bp, Lolium multiflorum
ggtcacaagcacgatcgaaggcgtcaaaatcacgttagagaatgcggcggagagaaggagtaagcggtggggaagcacacggttttggatgtatacacctctccgcgcggtacatatagcagccacgtgatgggctgtcggagaaaattaattctgcttagcaccccgaagagggaatcataaaacctcagcgacgctag

SEQ ID NO: 4135 - DNA, 200 bp, Lolium multiflorum
actggcatggttatacttcttgagaaaatattataagttaattcttcttttatttctaactagatctaatgagccttattaatgtaatagatagctttgcggcgtgagagaatgggacaagcggctcccttttggaggttctctgtagaatcctatcctgatcttgaagtgaaaaggccttcagaatctaccctaagcac

SEQ ID NO: 4136 - DNA, 200 bp, Lolium multiflorum
gtgcttagggtagattctgaaggccttttcacttcaagatcaggataggattctacagagaacctccaaaagggagccgcttgtcccattctctcacgccgcaaagctatctattacattaataaggctcattagatctagttagaaataaaagaagaattaacttataatattttctcaagaagtataaccatgccagt

SEQ ID NO: 4137 - DNA, 200 bp, Lolium multiflorum
ggccttcagaatctaccctaagcactcaatcaaagacaaccaatggcgactctgaagaatctttgcaggtaggacatggtaattctcatcattcatataatttttcatgtatccattttttctttagcattgcaccaacattgtttccatttattttgtacctggattgttgtgttgtttgaattcttttcatgcattca

SEQ ID NO: 4138 - DNA, 200 bp, Lolium multiflorum
tgaatgcatgaaaagaattcaaacaacacaacaatccaggtacaaaataaatggaaacaatgttggtgcaatgctaaagaaaaaatggatacatgaaaaattatatgaatgatgagaattaccatgtcctacctgcaaagattcttcagagtcgccattggttgtctttgattgagtgcttagggtagattctgaaggcc

SEQ ID NO: 4139 - DNA, 200 bp, Lolium multiflorum
tgtttgaattcttttcatgcattcaacagaaatcaacacgtgcaatagaatactctctcttccattcttcattagtaaggttgttcttttctgatttggtcttaatggggatttattgttgttcattttattaagatatgtcctaaatatatttcttccaatctgagtttacaagggaaaacaatatatagactagataa

SEQ ID NO: 4140 - DNA, 200 bp, Lolium multiflorum
ttatctagtctatatattgttttcccttgtaaactcagattggaagaaatatatttaggacatatcttaataaaatgaacaacaataaatccccattaagaccaaatcagaaaagaacaaccttactaatgaagaatggaagagagagtattctattgcacgtgttgatttctgttgaatgcatgaaaagaattcaaaca

SEQ ID NO: 4141 - DNA, 200 bp, Lolium multiflorum
ggaaaacaatatatagactagataatctaccaatattaaatccttgcaagtgtaccttctatgcaatgcgtattgatgcgattagctacatttgcctatttaatgcatatgtttagtagacaagcacaacttgatgcgtcatttaaattgtttgtatgattcatagtatcagcattctgttgacaattacttgttttatt

SEQ ID NO: 4142 - DNA, 200 bp, Lolium multiflorum
aataaaacaagtaattgtcaacagaatgctgatactatgaatcatacaaacaatttaaatgacgcatcaagttgtgcttgtctactaaacatatgcattaaataggcaaatgtagctaatcgcatcaatacgcattgcatagaaggtacacttgcaaggatttaatattggtagattatctagtctatatattgttttcc

SEQ ID NO: 4143 - DNA, 200 bp, Lolium multiflorum
tctgttgacaattacttgttttattttagaagttgtaaaaagttggctatattatatagcttaactacatctcacaaacaatggtagaaaatgaccattactagtttgttttgtgtagacaattttattgcagaaactttttctattatccacatagttttttttgcagtttgatgattgatttatatattcttatgttc

SEQ ID NO: 4144 - DNA, 200 bp, Lolium multiflorum
gaacataagaatatataaatcaatcatcaaactgcaaaaaaaactatgtggataatagaaaaagtttctgcaataaaattgtctacacaaaacaaactagtaatggtcattttctaccattgtttgtgagatgtagttaagctatataatatagccaactttttacaacttctaaaataaaacaagtaattgtcaacaga

SEQ ID NO: 4145 - DNA, 200 bp, Lolium multiflorum
atgtagttccaggctatttttcaatgaaaccatactacttcccagagtcttgctgttggccgagctgaaaaggaaggcatttcacgtattacaacagttgttcccggaactgatgaatccatcgagaagttagttcagcagctttacaagcttattgatgtacttaaggtaaatggcatgcaatttcttagggcaatcat

SEQ ID NO: 4146 - DNA, 200 bp, Lolium multiflorum
atgattgccctaagaaattgcatgccatttaccttaagtacatcaataagcttgtaaagctgctgaactaacttctcgatggattcatcagttccgggaacaactgttgtaatacgtgaaatgccttccttttcagctcggccaacagcaagactctgggaagtagtatggtttcattgaaaaatagcctggaactacat

SEQ ID NO: 4147 - DNA, 200 bp, Lolium multiflorum
gcatgcaatttcttagggcaatcatttacgatataaaatatgttgtgtaatgcaaaacatgtgattgtcccaggttgaggacttgactcacttaccttttgccgaaagagaactgatgcttatcaaggtatctgggaacaccgctgctcggagggagatactagatatcggtcaaatcttccgggcagaatgtctggatc

SEQ ID NO: 4148 - DNA, 200 bp, Lolium multiflorum
gatccagacattctgcccggaagatttgaccgatatctagtatctccctccgagcagcggtgttcccagataccttgataagcatcagttctctttcggcaaaaggtaagtgagtcaagtcctcaacctgggacaatcacatgttttgcattacacaacatattttatatcgtaaatgattgccctaagaaattgcatgc

SEQ ID NO: 4149 - DNA, 200 bp, Lolium multiflorum
atgtgcactaaattgcaatttaaatccccatttcgaaaataactggcacacttttctttcttcagcctacagggttttgttcacatactttgtcaatccttgtgaatgatttccctggagttctcaatgttgtaacgggtatcttttcccgaaggggctacaatatccaggtttgttttccatttgtagatatcttatgt

SEQ ID NO: 4150 - DNA, 200 bp, Lolium multiflorum
acataagatatctacaaatggaaaacaaacctggatattgtagccccttcgggaaaagatacccgttacaacattgagaactccagggaaatcattcacaaggattgacaaagtatgtgaacaaaaccctgtaggctgaagaaagaaaagtgtgccagttattttcgaaatggggatttaaattgcaatttagtgcacat

SEQ ID NO: 4151 - DNA, 200 bp, Lolium multiflorum
cgtggcaggtgatggggttggttgacattttcagagcaaaagtggttgatctttcagaccggacactgactattgaggtaaaatccatggtgtgttgtatcttgctgctcgcttacattatcacttgtatgcttttattaaaccaaagtatgctctctgttttttgagtcattccaaaggtaactggagatcctggaaaa

SEQ ID NO: 4152 - DNA, 200 bp, Lolium multiflorum
ttttccaggatctccagttacctttggaatgactcaaaaaacagagagcatactttggtttaataaaagcatacaagtgataatgtaagcgagcagcaagatacaacacaccatggattttacctcaatagtcagtgtccggtctgaaagatcaaccacttttgctctgaaaatgtcaaccaaccccatcacctgccacg

SEQ ID NO: 4153 - DNA, 200 bp, Lolium multiflorum
ctttacaagctcatcgacgtttatgaggttaacttattaatgttgtggtttgcattattgttgttgcctatgtaaggttagctcaaattcgccttggtttttcaggtccaagatcttacacatttaccgtttactgctagagagttaatgatcatcaaggtcgctgggaacacctcagctcgcagggctatcctggatat

SEQ ID NO: 4154 - DNA, 200 bp, Lolium multiflorum
atatccaggatagccctgcgagctgaggtgttcccagcgaccttgatgatcattaactctctagcagtaaacggtaaatgtgtaagatcttggacctgaaaaaccaaggcgaatttgagctaaccttacataggcaacaacaataatgcaaaccacaacattaataagttaacctcataaacgtcgatgagcttgtaaag

SEQ ID NO: 4155 - DNA, 200 bp, Lolium multiflorum
gccaggagagggtacaacatcgagtcgttggccgtcgggctgaacaaggacaaggcgctgttcacgatagtggtatccggaacagagaaaatactgcaacaggttgtggagcagctctacaaacttgtcaacgtcatacaggtcagtatgttcctccaataaaccacttgaattacaagatcattgctaactgatacgta

SEQ ID NO: 4156 - DNA, 200 bp, Lolium multiflorum
tacgtatcagttagcaatgatcttgtaattcaagtggtttattggaggaacatactgacctgtatgacgttgacaagtttgtagagctgctccacaacctgttgcagtattttctctgttccggataccactatcgtgaacagcgccttgtccttgttcagcccgacggccaacgactcgatgttgtaccctctcctggc

SEQ ID NO: 4157 - DNA, 200 bp, Lolium multiflorum
caagatcattgctaactgatacgtagtaatgcgccgtcaattgaatcgttcatttcatttttcgtgcttgtttcagtcgtcagatcctctgatattcgtagctttgtatattgatgaaacaggttgaggatttgtcaaaggagccacaagttaaaaaagagctcatgctgataaagctgaacgtagagccagagcagcgt

SEQ ID NO: 4158 - DNA, 200 bp, Lolium multiflorum
acgctgctctggctctacgttcagctttatcagcatgagctcttttttaacttgtggctcctttgacaaatcctcaacctgtttcatcaatatacaaagctacgaatatcagaggatctgacgactgaaacaagcacgaaaaatgaaatgaacgattcaattgacggcgcattactacgtatcagttagcaatgatcttg

SEQ ID NO: 4159 - DNA, 200 bp, Lolium multiflorum
gctgaacgtagagccagagcagcgtcttgaggtaaatttgtatgcgcgtaggatgctcgattatatgcttcagttggagtggaggtgagggtagaatgctgttactctttgcttatttctccacttgtacgtacatgcaggtgatgggtttggttgacattttcagagcaaaagttgttgatctttcagaccggacactg

SEQ ID NO: 4160 - DNA, 200 bp, Lolium multiflorum
cagtgtccggtctgaaagatcaacaacttttgctctgaaaatgtcaaccaaacccatcacctgcatgtacgtacaagtggagaaataagcaaagagtaacagcattctaccctcacctccactccaactgaagcatataatcgagcatcctacgcgcatacaaatttacctcaagacgctgctctggctctacgttcagc

SEQ ID NO: 4161 - DNA, 200 bp, Lolium multiflorum
ggtcatgcttgtagctaatgtgttcagagcgaaagttgttgatatttccgagaattctctaaccctagaggtaaaaacttggcttcaaacagtattataaggactagggtgttccgtgtctatgctggattaaatttcttgatgctgatctggctaatgctgcaggtcactggagatcctggaaagattgttgcggcaca

SEQ ID NO: 4162 - DNA, 200 bp, Lolium multiflorum
tgtgccgcaacaatctttccaggatctccagtgacctgcagcattagccagatcagcatcaagaaatttaatccagcatagacacggaacaccctagtccttataatactgtttgaagccaagtttttacctctagggttagagaattctcggaaatatcaacaactttcgctctgaacacattagctacaagcatgacc

SEQ ID NO: 4163 - DNA, 200 bp, Lolium multiflorum
gttttgttcacatactttgtcaatccttgtgaatgatttccctggagttctcaatgttgtaacgggtatcttttcccgaaggggctacaatatccaggttcgttttccattcgtagatatcttatgttccctcaattagatcactccaggttagtgttgcggttcattgtttacagacgtgcccattactttgacagagt

SEQ ID NO: 4164 - DNA, 200 bp, Lolium multiflorum
actctgtcaaagtaatgggcacgtctgtaaacaatgaaccgcaacactaacctggagtgatctaattgagggaacataagatatctacgaatggaaaacgaacctggatattgtagccccttcgggaaaagatacccgttacaacattgagaactccagggaaatcattcacaaggattgacaaagtatgtgaacaaaac

SEQ ID NO: 4165 - DNA, 200 bp, Lolium multiflorum
gacgtgcccattactttgacagagtcttgctgttggtccagctgaaaaaataggcacttctcgcatcactactgtcgttcctgggagtgatgaatctatcgccaagctaatacatcagctttacaagctcattgacgtttatgaggtcaacttattaatgttgtggtttgcatgattttttgttgcctatgtaaggttag

SEQ ID NO: 4166 - DNA, 200 bp, Lolium multiflorum
ctaaccttacataggcaacaaaaaatcatgcaaaccacaacattaataagttgacctcataaacgtcaatgagcttgtaaagctgatgtattagcttggcgatagattcatcactcccaggaacgacagtagtgatgcgagaagtgcctattttttcagctggaccaacagcaagactctgtcaaagtaatgggcacgtc

SEQ ID NO: 4167 - DNA, 21 bp, Unknown
  Found in multiple species
tttgtccttgttcaatccaac

SEQ ID NO: 4168 - DNA, 21 bp, Unknown
  Found in multiple species
ttgtccttgttcaatccaaca

SEQ ID NO: 4169 - DNA, 21 bp, Unknown
  Found in multiple species
ttggattgaacaaggacaaag

SEQ ID NO: 4170 - DNA, 21 bp, Unknown
  Found in multiple species
ttgaacaaggacaaagctctc

SEQ ID NO: 4171 - DNA, 21 bp, Unknown
  Found in multiple species
tgtccttgttcaatccaacag

SEQ ID NO: 4172 - DNA, 21 bp, Unknown
  Found in multiple species
tggattgaacaaggacaaagc

SEQ ID NO: 4173 - DNA, 21 bp, Unknown
  Found in multiple species
tgaacaaggacaaagctctct

SEQ ID NO: 4174 - DNA, 21 bp, Unknown
  Found in multiple species
gtccttgttcaatccaacagc

SEQ ID NO: 4175 - DNA, 21 bp, Unknown
  Found in multiple species
ggattgaacaaggacaaagct

SEQ ID NO: 4176 - DNA, 21 bp, Unknown
  Found in multiple species
gattgaacaaggacaaagctc

SEQ ID NO: 4177 - DNA, 21 bp, Unknown
  Found in multiple species
gaacaaggacaaagctctctt

SEQ ID NO: 4178 - DNA, 21 bp, Unknown
  Found in multiple species
attgaacaaggacaaagctct

SEQ ID NO: 4179 - DNA, 21 bp, Unknown
  Found in multiple species
ttttacaagcatcaattcacg

SEQ ID NO: 4180 - DNA, 21 bp, Unknown
  Found in multiple species
tttacaagcatcaattcacgt

SEQ ID NO: 4181 - DNA, 21 bp, Unknown
  Found in multiple species
ttgttcaatccaacagcgagt

SEQ ID NO: 4182 - DNA, 21 bp, Unknown
  Found in multiple species
ttcaaaagcttgtcaatgttt

SEQ ID NO: 4183 - DNA, 21 bp, Unknown
  Found in multiple species
ttcaaaacattgacaagcttt

SEQ ID NO: 4184 - DNA, 21 bp, Unknown
  Found in multiple species
ttacaagcatcaattcacgtt

SEQ ID NO: 4185 - DNA, 21 bp, Unknown
  Found in multiple species
tgctcctttctggcgtttttc

SEQ ID NO: 4186 - DNA, 21 bp, Unknown
  Found in multiple species
tcgctgttggattgaacaagg

SEQ ID NO: 4187 - DNA, 21 bp, Unknown
  Found in multiple species
tccttgttcaatccaacagcg

SEQ ID NO: 4188 - DNA, 21 bp, Unknown
  Found in multiple species
tcaaaagcttgtcaatgtttt

SEQ ID NO: 4189 - DNA, 21 bp, Unknown
  Found in multiple species
tcaaaacattgacaagctttt

SEQ ID NO: 4190 - DNA, 21 bp, Unknown
  Found in multiple species
tatagtaaaaagagccttatc

SEQ ID NO: 4191 - DNA, 21 bp, Unknown
  Found in multiple species
tagtaaaaagagccttatcct

SEQ ID NO: 4192 - DNA, 21 bp, Unknown
  Found in multiple species
tacaagcatcaattcacgttc

SEQ ID NO: 4193 - DNA, 21 bp, Unknown
  Found in multiple species
ggataaggctctttttactat

SEQ ID NO: 4194 - DNA, 21 bp, Unknown
  Found in multiple species
cttgttcaatccaacagcgag

SEQ ID NO: 4195 - DNA, 21 bp, Unknown
  Found in multiple species
cttcaaaagcttgtcaatgtt

SEQ ID NO: 4196 - DNA, 21 bp, Unknown
  Found in multiple species
cttcaaaacattgacaagctt

SEQ ID NO: 4197 - DNA, 21 bp, Unknown
  Found in multiple species
ctggagatccaggaaagatgg

SEQ ID NO: 4198 - DNA, 21 bp, Unknown
  Found in multiple species
ctatagtaaaaagagccttat

SEQ ID NO: 4199 - DNA, 21 bp, Unknown
  Found in multiple species
catctttcctggatctccagt

SEQ ID NO: 4200 - DNA, 21 bp, Unknown
  Found in multiple species
caaaagcttgtcaatgttttg

SEQ ID NO: 4201 - DNA, 21 bp, Unknown
  Found in multiple species
agtaaaaagagccttatcctt

SEQ ID NO: 4202 - DNA, 19 bp, Amaranthus palmeri
tcttctccgactctcacaa

SEQ ID NO: 4203 - DNA, 19 bp, Amaranthus palmeri
tcttccaccctctctaatg

SEQ ID NO: 4204 - DNA, 19 bp, Amaranthus palmeri
ggtggaaagattggaactt

SEQ ID NO: 4205 - DNA, 19 bp, Amaranthus palmeri
tcgtttgtgggtttgtaag

SEQ ID NO: 4206 - DNA, 19 bp, Amaranthus palmeri
gcaatggaagtttctgcaa

SEQ ID NO: 4207 - DNA, 19 bp, Amaranthus palmeri
agttcctgtttcagctcat

SEQ ID NO: 4208 - DNA, 21 bp, Amaranthus palmeri
tgtatgtcaaggtttaggttg

SEQ ID NO: 4209 - DNA, 19 bp, Amaranthus palmeri
gcaataaggtgatggcgtg

SEQ ID NO: 4210 - DNA, 19 bp, Amaranthus palmeri
gcgcctccactatcttctt

SEQ ID NO: 4211 - DNA, 19 bp, Amaranthus palmeri
gctttcctctcgcactaat

SEQ ID NO: 4212 - DNA, 19 bp, Amaranthus palmeri
ccatttacgctatcccttt

SEQ ID NO: 4213 - DNA, 19 bp, Amaranthus palmeri
cccacttcttcttcttcaa

SEQ ID NO: 4214 - DNA, 19 bp, Amaranthus palmeri
cctaaacctaaacctcctt

SEQ ID NO: 4215 - DNA, 19 bp, Amaranthus palmeri
tgttctcgttgaagctctt

SEQ ID NO: 4216 - DNA, 19 bp, Amaranthus palmeri
ggaaatccatcaagctctt

SEQ ID NO: 4217 - DNA, 19 bp, Amaranthus palmeri
ggagtttgtattgccactt

SEQ ID NO: 4218 - DNA, 25 bp, Amaranthus palmeri
tcaccgatgataaaccctcttcttt

SEQ ID NO: 4219 - DNA, 25 bp, Amaranthus palmeri
tgtttcccgatttagccctgaagaa

SEQ ID NO: 4220 - DNA, 25 bp, Amaranthus palmeri
cccagaaaaggttgcgatgttctcg

SEQ ID NO: 4221 - DNA, 25 bp, Amaranthus palmeri
ttgaagctcttgaacgtgaaggtgt

SEQ ID NO: 4222 - DNA, 25 bp, Amaranthus palmeri
taccgatgtttttgcttaccctggt

SEQ ID NO: 4223 - DNA, 25 bp, Amaranthus palmeri
ggagcatccatggaaatccatcaag

SEQ ID NO: 4224 - DNA, 25 bp, Amaranthus palmeri
ctcttactcgttctaatatcattag

SEQ ID NO: 4225 - DNA, 25 bp, Amaranthus palmeri
aaatgttcttcctcgacatgaacaa

SEQ ID NO: 4226 - DNA, 24 bp, Amaranthus palmeri
ggtggggttttcgctgctgaaggc

SEQ ID NO: 4227 - DNA, 25 bp, Amaranthus palmeri
acgctcgtgctactggacgcgttgg

SEQ ID NO: 4228 - DNA, 25 bp, Amaranthus palmeri
agtttgtattgccacttctggtccg

SEQ ID NO: 4229 - DNA, 25 bp, Amaranthus palmeri
ggtgctactaatcttgtctctggtc

SEQ ID NO: 4230 - DNA, 25 bp, Amaranthus palmeri
cgaagggtgatgcggttgtaagtac

SEQ ID NO: 4231 - DNA, 25 bp, Amaranthus palmeri
cggtgttgggcagcaccaaatgtgg

SEQ ID NO: 4232 - DNA, 25 bp, Amaranthus palmeri
gctgcccaattctataagtaccgaa

SEQ ID NO: 4233 - DNA, 25 bp, Amaranthus palmeri
atcctcgccaatggctgacctcggg

SEQ ID NO: 4234 - DNA, 25 bp, Amaranthus palmeri
tggtttgggggctatggggtttggt

SEQ ID NO: 4235 - DNA, 25 bp, Amaranthus palmeri
ctaccagctgctattggagctgctg

SEQ ID NO: 4236 - DNA, 25 bp, Amaranthus palmeri
acaaaaagcacaaattcaataatat

SEQ ID NO: 4237 - DNA, 25 bp, Amaranthus palmeri
actctttaagtttgtttatcttcta

SEQ ID NO: 4238 - DNA, 25 bp, Amaranthus palmeri
attagttcggttaaaacggttcccc

SEQ ID NO: 4239 - DNA, 25 bp, Amaranthus palmeri
actttcttctccgactctcacaatt

SEQ ID NO: 4240 - DNA, 25 bp, Amaranthus palmeri
atcttcccctattcatttttcttcc

SEQ ID NO: 4241 - DNA, 25 bp, Amaranthus palmeri
accctctctaatggcggctgtttcc

SEQ ID NO: 4242 - DNA, 25 bp, Amaranthus palmeri
ttcaatatcaatggtggaaagattg

SEQ ID NO: 4243 - DNA, 25 bp, Amaranthus palmeri
gaactttatgttcaagacacgaatt

SEQ ID NO: 4244 - DNA, 25 bp, Amaranthus palmeri
cgtttgtgggtttgtaagaaaattt

SEQ ID NO: 4245 - DNA, 25 bp, Amaranthus palmeri
cattttagaactcatacttctatat

SEQ ID NO: 4246 - DNA, 25 bp, Amaranthus palmeri
ttgaaaaacatatgccaaaaacttc

SEQ ID NO: 4247 - DNA, 25 bp, Amaranthus palmeri
aaggtttaaagcaatggaagtttct
